United States Patent Application Publication US 2008/0171318 A1 - sequence listing, part 2

SEQ ID NO: 673 - DNA, 6161 bp, Artificial Sequence
  chemically treated genomic DNA (Homo sapiens)
agagtgtgttttatatttggggaaggaagtatagattttaatttggagttgatggtttagttagtggttttttaatttttttttagtagtaaattttttaatgtaaataaaattttattttgaattttaatatgtaagatagttataaggggagttgttttgtttgagggtaaattgtttagtttgtttagttttttattttttttatttttttaaggatttttgaggtaatttttaggaaattttagggttttgttaagtagtttgaaaattattggtttagtttgttttgagtaagttagagattttttattttaattgtttgttataagttggttttgagtttttggtgttagtatatttataataagattaagtggtatatgtagtttattattttttttagaaatattatgaaaaagtgtagtttttttttaaaagtagaagtttggatttaatatttgaggttaatttggttttatgttttggtgagtataattatgttgttatattttaggattaagtgaaaatttttaagaagagttaattatggtttagttaaggtgattagtgtttaggattataggtagggttttagagtattgtgttagaaagttagtattggagagtagtaattttagtattttggaaagtgtagtagtgaggtttggtttagggtatgtatttggagtgaataattttttttttaaaagaaaaagttataatttgaagttgttttagaggattgtgagttttaaagttaatatttttagattttgaggtatagataagtaatatttatgtaaatagtgtggttttaaataaattataaatgtttttaggttatggtaggtattttagaatttatatgtttggtttttgataaagttgaattaaagtttataatatagtataggttagttttggagtatttattatttttatatttatgggatttagatttgaaatggttattttaaggtattaatagttttattgagatatagtgtgggatttagattgtattttagattagtatttatgtttataattttaaaaggaaaattagttagggttttaatttagagttttagtttgggtatagaggttttagagattggaaatattttaggtattattgtgtttgagtgggagaggagggtggtaggtaggtttggttatttaagtttttatttatttaggtttaatagttttgtttttttattagagtttaggaggtagtagtaagtgtataatgtataaggaagggggatgatgaaggaataaggttagttgtagaattgtttttttttttaaagttttgttaattattttttggaaagaagtagtagagtttttggtttggatataatgtttttttttaagttttgaggtattaggataagggtaggggaaaggaggggttgggaggagggatagagaattgtttttagtttttgttattgtaagagggaatgttttttttttgaggaattttattattattagatttgttaggtagtttagtatgtatattagtatgtgtgtatatgtatatgtgtgtttaagtagtttattgttaatagttatttttttttattatttgagaatttttaagtttttattttaaagggatgtgttttttgtgttttttaaattttatttatttaatggaatatagttgtttatgtaagtttattttttttagggttgtgaagtaagttttaggttgttttatgtgtttatatttataggtgtgattttttttattttttttagttttggaatgattatattttttgtgtttttaaatttgttaaaatattttttttttttttgtgttttgtttatttttttaattgtttatttggtttatttagtttttttatatattattttttttttgtttattttgttttatgtttatttatttattaattttattttttttaagggtatttttttgttttgtttttgtttttttggtttttagttatatttagttttatttggttttggatttttatttgttagtaaaaaaggtttttatagttattagggtttttagtgttatggtttttgttagtattgtttttattgatgtttagttttttttttgtagatgttgtgttttttttagggttttgtttttgtatagagttgtgaattttgtttgtgggagagaagggaagtaggagagaaagaaggagaaagggatattaggagaggaaagagtggagagaagaggagaggaagagttttagttttatttattgtgagtattattttatatttagtttttttttggttaaagtttttttttttgtaagtttttttgatttttttaggtgtatttttattttgagagattggtttatttgtttattttgtttttagtgaattttattttttttttggtgaaaaattttgtttagaattagtattttttgttaaggtttgtttgattattatttatttttggttttttttattttttatgttatgatttagatgtaaaaagtttttgataatatttttttgtaggtattttttgggtgtgtattttgttttttgtttgggattatgagtttatttagtgttgattgtatggtagttttggagtgtagagtttaggtattttttaatttaattttatttagatggggagatttagttttgtattttatttttaatatagttgttttagtttttaattagagtttttattttttttttggagattagttttgtagaaggatgtgtagagtggtaattgagaagttttttatttagtttttattgttgtggatttagttagttagttgtgtttttaggtaggttattatttatttttgtatttgttttattagtggttttatttttttgttgatatttttagtatatagtgtagttttaaagataaagaaggttataaggtggttttagttggggtttttttgaaaaagtttattggagatttgggtgaagtgttgttgggttgagtttggggttatatgtagttgagttgttagattagagaaggtgtgttggaagtgggttttgaatttatttttagttgtttgtatggtttggtgtagtgggttagttgttgggttttttttggggttagttttatagatataatttttttgttttagtttataatttataaagtttgttattagagtttgtgtgtttggggttgaggttggggttgttatttgggtggttataagaggtaaggatgaaagattggtatgaatatatgaagagagaattagaaggagtatttttggtttgattaatttagtgagatgaggaggagagaggaaatgtttaggatttattggatagggagaggtaagaataagggaattaagttatgatatgagattaggttgtgagtggttggttattatatttttaatatgttaaattaaatgtaaaataagtaaattttttgtttaggatattttagattttttttataataagataatgttagtttaatgatatttttataatatttttatttttgggtttttttagtttatatttttttggttagaggaagggttttaggatttttttaaatgtaagatgtaaagatgttggtagagatataagatgagggggagtagatgggttgaagagaaaggtgggagatgtaatgggttattttagatagagaaaggaaggagatatttatttagttgggatggtagtttttaagatatagtattggtggtaaggagtttttagttggggttttttatttttttggttagtgtggagttttggaaaggggagggggagattagaattaggaggggaaggttagggattaggttttggtttgggaagggttagggttgtagttttgggtttaggtttttgtttttaatgttttattagttgtgtggttgaatttatgtttaatgattgtttttttgggaaatttaaggttaagggttttttgttgatattatttttatttttggttttttttagtgtagtttaaaggtttagttttttttttatttttattttagttagtttttaattttgtttgtttgttaggttagggattttatgggttaggttgttgttgggatttgggttgttttttggtgtaggagttgggagggagggagagagggaggaagggagggaaggaaggagggaggagaaaggggggggtagagggagggtttggtgttgggtgatgatggggtttagagatgtgtttagagagaggggtggggttgggatgtaggtttgtaaagggttattatttaggaagagggagggttgttgaaggtaaagaagggttggttgagagggtatggtgggttgggttgggttgggtttttgagtttttaggttgtttagagaaatatgttggattttgggatattttggggtaaatttagtatttttaggaggtttttgatgttttatgtatttgttgaatttttttagttttgaattgtgtgtttggaaaataggagtagtttttattaagttgggaattgtttattaggtgttttatttttatggggttagtagatattatatagatattaaattttttttattttttttttaggatttttaatttagtgttttttttgtgggttgggttttagttaggtattagggagttaggatttggattataagtagttttttttggtatttttttttaatttatttttttttgtaattagattgattttagtggggttttttttttttttttttttttatttaatatataaatttatttttattatgaaaaaaattaaataataaagatgtgtggagtaataaaatataggtttttaaatatatatatatatatatatttaattttatttttttttttgtaggttgttagtgttaagtttgatgtttatttttttagattatatatatatggggttattatttatatatggtagtatatttatatagggtaggttataggtgtgaagtagtttgattatagttgatttatatgagggtatttatagttagttttttgggtttttggatttggtatttttttaaagagtgttttaattaaaggttagaaagaggtaatttaatttttttattttgttagttttttttgtttttatttttaatttaagtttttgtattattatttttttttatggttattggagaagtaaggttttttttgtagtaataatagtaataattagttgggtttggtggtttatatttgtaattttaatattttgggaggttaaggtgggtggattatttgaggttaggagtttgagattagtttgattaatatggtaaaattttatttttattaaaaatataaaaattagttagatgtaaaatataaaaattagttagtttgtaattttagttgtttaggaggttgaggtatgagaattatttgaatttaggaggttgagattatgttattgtattttagattgggtgatagaatgagattttattttaaaaaaaaaaaaaggtaaaaattaatatattttgaggagttattagatgttgtgttttttttatatgtgtattttttttttttattagtttttatgttgttttatttttattttatgaatgaggaaattgaggtttggagaggttaagtgatttttttaaagttataggttgatatgtaagaagttagtatagttattttatgttgtaattttgatattattgttttaagattattttttgtttttatatagttaatatggtttttatagtttgaatttatattatttataagtttatatttaatttttttttttattttaaatatatagtttattatatttttttatggttgtatttttttaattatttttattttatttttgtttttagtttgattattttggttgttattagtaaggttgtttttttttttagagaataatttagtttaagtttttatttgtatttttggtttatttgtttgtttgtgatataaggtttttattttatggtttaaattggagtgtagtggtataagtatagtttattttagtttttattgtttaggtttaagtaatttttttattttagtttttttggtagttgggattagaggtgtattgtattatgtttggttaaatttattttttatagag

SEQ ID NO: 674 - DNA, 6195 bp, Artificial Sequence
  chemically treated genomic DNA (Homo sapiens)
atttttattttttagaagagtttggtatatagtggatttttagtaaatatttggtgaatgaatagattgttgataaaatatgttataattttatttttattgtttttagtttaggttgtttaaataggatttatttgtgtagtgtagaaattttaatataggtttatagtgaagttttattttggtaaaggttttaggatttgggattattaaatgtaaaaaaagagtaaatttattttttagatatttattggttgattaggtgagggtttgggatatattaaatgtaggtaagtaagaattttaagttattatttttgtgtatgtaggtagtattagtgttagtaataataagttagtttttttggtaaatttattaaaattaaattttaaatttttgaaaaaattaatatgtttattatgtttttgttagtttagaggtttaattatttgtgggggagggtttataattatgattaattatttatgatttgaaggtatttataaaagtatttgtttttttaagaaattattaaagaattaggtttaagattgtaaaattaattttaggggtaatagtaaattataggtttggggatttaattttgataatttttttttggaaagaaaagaattgttgttaattgtttttattttttgattttgtttgagtaaatatttgtagtttttaaaatttagaatttttagtttggttaagtaagttatggggattaatggttgttttaaggtagaggtagaagagaagaaataggaaggaaataaaaagggaatgaagatttgtagtttatgagggtgatattattaataatttttttaagtattattgaattttatggtttgtgattgagagttttttttgatattttataggttaattatttttaaggatttttttggttttagagtttgtaatgtttgggtttgaatatgatttgttttataaaaaaggttaggtgaattgatttttttttgtgaagttgttttatggtaagagattattaatttgttgaaatgtaaataattttttagatatttgaagtatttttaaatttataaagtgtttttatatatgttattttattttatttttatgattttaataggtaggtgttattattattttaatatgtaaaaataattttagaaaataatgtttttgtttttagtttataagaatatttttttgaaatttatagtatagaatttaagttatgggttagttagaaatgtttagaaatatattaattttaggaggataaattaagagaataggatggattagataaaatttataagtataatggtagaaagtgtgtttttggtataagaatggtgtaagttttgtaaataatagtgttatataggggtgtttttgtagtatttttatgtttggaaggatattatttatttatatatatgataagtatttttaattggatattttataggtaatagataaaataaaataagaatttttgttttaaaattgtagtggtggaatttattttttgggatgtattaggtgatttttttaggatgatagttgagttatagggggttaaatatattttttttttttttttttaatattataaagagttttaaaaatggattttgttgtttttaataaataaaatatatatgaaaaaaagttatttataggtttttatatataattttattttttaaaatatttatttttttttattagttaggttgaggtataatgtggttttaattttataattatttattgttttatttatatatttatgattttttgatgttttttagtttgagtttaaattgtgttgggaataaagtattgtataaattattagtttgggataagaggagataagttaaaattttttaagaagattttgtagatatttggtttttttgagtttgtagagagtttggtattttaaaggttagttttgggtttttttattttgatgattaatgttaaattgtttgattttttataaaaatatttagttgtgtttatttatattattttatttttagtgtatatagtaggtatgtatttgttgaatagaagttttaaatggatgagaaaaaagatatttttgttatatatttttttaagattgagaaaggtaaaattataatttaatttgtagaagtttttaggtatttttttttaatgtaaagttatgtatttttgtttaaaaaagaaaaggatgatataattaaataatgttaattatataatggggaaattttaggattattaagaaaatattattattttaagttatatatttttatttaatattggttattatataggagagagtaagaattgttgtttttttatttatttgtataatttatttgggaaaagtatgggtagaatatttatgatttaattatattatattttggatttatatttaattttttggagaattagtttaaagagtatgtttgtttagagatataaagtaaaatagatatagggataatagttttggaagaaatttttatgatgttgtttgagattgggtattagtatttaaattttttagattattaggagttatttttattatgtaattttaataaagagaaattgagagtatgattggtaaaaatattatgatgtttttgtattttgttaatttgatttatatttggttttatttataaagtttttattgattattatatggtatttttattttttagttttatttattttgttttttaaaaattttttaatggtatggttatgaaaaatatgtgggggttagtggggtatgttttaggttggtttattttgtttttaaaatgtatttattttttttagatttttttttagggtgggtagggagaaaatgtttttaagttgtatagttgtagggaagtttgtttaggttatgtttttttgatttgttttttggtttgttgtttggtaaggttattggttttggtttgtggttttgttgataaaatttaatttttattttgtaagattaataggttgtgtaggatttttttagttgttttttgttttgtatttttttgggtttgaggatttttggtttggttttttttgtgtgtgtgaggttttagatggtgagggtgtagttttttggtttatttgattatgttggggtgtttgaaggtttttaggtgttttagtattgttattttgtggatggtggagagtggtatgttttttttgttggtttgtatttgtatgtgttttaatgttatgaaatggtttttgttttttaagttgtgggttttgaatatttttttataggtgttttttttgatttttgttatgtatttgtattgttggttagtgtggtataggttgtttttttttatgttgtttggatgttgtttgttgtggtgttgttggggtgggtggggggtgtgtttaattagttggtggttgttgtttgtttattttggggttttttggagattggtttagttttatttgttttttgttggtttaggtgtttgggtgttggggtttttgttgttgtagaagttggatggagagatttttttgtggggttggtgtaattttggtgttgttgttgtgaaattttgtttgtagagttgttgttgttgttgttgttggaggagtgagttgatttttttttttttttttttgaagtgaagtttttaatatagatatgattatatagtttttgtttaagtgtgttttagtttagaattattgtatttaaaggaggagatgggaggataagaagaaagtgtaattagatagtttagaagttttttttggggtttttttagattttttttttttttttttatgaagtttttattgttattttttgtgtgtttttgtttttttttaagttgtttaattttttttggtttttttgagaaaagtgaagttatttttttttttttgtagggttgaagttgtttttgtgtggagaggttgtaggggttttttggggatgagtgagtggtgtgggatgtagtggaatgggagggggtgtgttgagtagtttagagtgtgttgggagtgtgggggaggggaggtgttgggtatgttaatgttatggtttaatatttatttttatattattgtgttgtgttgttattttttttgttttttgaggtttggatgtgtagggagatggggtttaggggtgttggagggtgtttaggggttgtgtataagttggagtggaaggattgtgggtttatttgtgtggggttgtagaatgtgggtgggggtttttaggattttgtaatttgatgttgggagtgtgtgagaaggggtggttagatatttgtttagaaattgttttttttttttttatttttagtttttttatgaggagatatttaaaaatgatttgtatatataaatggtttttttggggtaaaggagttttggttggaaatggaattttttttttggttgggaggatttttttggtggaaattttgggaagattagttatttggttggggagggttggggtttattgggggtgggtgagtgagtggttttgggggaggggagatattgttttttatgggattttaagggtgggagaaaggggtgtttgttataattttgtttgttgtttttttaaagaataattttaggaaggggatagtataattgtgttttgtttttaagttttaaattgattttgatttgagtaaaatttaattttttttttaaagggtggggggtggggggttaaattttgtgtttttaggggtgagagagaaggtttttgtttttggggtttggatttgtgaatttttttttatttttaggatttttttgttgtaggtagtagaggtggttgttttattttttttttggttaaaggtttggtttagtttgtagttggatgtttttggagttttttgtataataaagtgttagagtagggtattttaattttttttttttatttagtagttatttgggatttagggggttttttttttttagggttgttgtggttttggtaggatttttattatgatggttgtatgtttggaatttttggggtattttggaattatttgttttgtaattgttggtttgtttgttttttgttaggaattaaataaatggtgtgatttttatgatgagtgggtggagtggattgtggtgagagtagagtttttggtatttattatatttagaattttttttaaaagttgaggaaagagtttttagggattgtttgggggtttgagttaggttgagggttatataggtagttggggagttgttgttggttgtttaatttgtttgttttgtatttttttaatttttttttgtttgagtttagttttgggttttgtagtgaaggaagtgttggggatgttttatttttgtagggaattgtgtttgttgtttttgttgggttttgtattgttttggttttttttttatttgttttttagatggttggttttggtggagagaaatgggagtagtaatgtttttttttttttttttttttatttttttttgttgttgttgttgtttttttatgttggttgaatgtgatttgattttattttaaaaaaagtttgatatagtgttttaatatttttgtatttttttgtgattataaaggttgtagttgtttttttttgttttttgtttttgttttttgtttttatatttaatgaaattttttatgtgttttttttgaagtttgttaagtattataagggttgttattagtatagtgataagaggttatattggggattgtgatttttgtgtgtgtgtatatgtagatgtgtttatatgtatatggatgggtgtgttgtggggattagggttgtttattgtggggtgtgtgtttaattttaatattttaaattataaaagtaaatttggaaattatagtaaatgtgtgtttttgtggggttttaagtttgggtattggttggttgtgtgtatttttttgtgtataatatgtttgtaggaagtttgtgttaatatttattttgtggaggggaaggtggagtttatatttatattttagtgagttggagagggagtttttgagggggaaatgtaagtatattttttagtatggagtttttagaggtagtgtattttaaattttaaatgtgaattattatgtgagtgtttgagtagagttttagttt

SEQ ID NO: 675 - DNA, 6195 bp, Artificial Sequence
  chemically treated genomic DNA (Homo sapiens)
gaattggaattttatttggatatttatataataatttatatttagggtttaaaatgtattgtttttagggattttatgttggagaatgtgtttgtattttttttttgaaaattttttttttagtttgttgaggtgtgggtgtgggttttatttttttttttatgagataaatgttaatgtaggttttttgtgggtgtgttatatatagaaaagtgtatgtagttggttagtgtttaggtttggagttttgtgaagatgtatgtttgttgtagtttttaagtttatttttataatttaaaatattggagttaaatatatgttttgtagtgagtagttttggtttttgtagtgtgtttgtttgtgtgtatatgggtgtatttgtgtgtgtgtatatgtgggagttgtggtttttggtgtggttttttgttgttgtgttggtggtgatttttgtggtgtttggtaggttttgggagaggtgtatgaaggattttattgagtgtgaagatagagagtagagatagaaagtagaaggaggtggttgtagtttttgtagttgtggaggaatgtggaaatgttgaagtattatgttaaattttttttgaaatggggttaagttatatttagttagtgtgggaaagtaataataataataaaaaaaagtggaggagagggggggaaaaggtattgttgtttttgtttttttttgttgaagttgattgtttggggggtgagtggggggagagttagggtagtgtggggtttggtgggggtagtaggtgtagttttttgtgggggtgggatgtttttgatgttttttttgttgtggagtttggggttagatttgagtgggagggggttggggggatgtaggataggtgggttgggtggttggtggtggttttttggttatttgtgtggtttttgatttggtttagatttttgggtagtttttgggggttttttttttggtttttaaggaaagttttgaatgtagtgagtgttagaagttttgtttttgttgtggtttgttttatttgtttattgtgggggttgtgttgtttgtttaatttttggtaaaaggtgagtgggttagtggttgtgaggtaggtaattttgaggtgttttgggaattttggatatgtggttgttgtggtgaaagttttgttgaggttgtggtggttttggaggagggaggttttttaggttttagatagttgttgaatggggagggaaagttagggtattttattttggtgttttgttgtgtagagggttttgggggtgtttggttgtagattggattgggtttttagttggagggggaatggggtagttatttttgttatttatagtggggaggttttgggaatgggaaaaggtttgtgagtttgggttttgaggatagagatttttttttttatttttggaggtgtaggatttaattttttattttttattttttgaaagggaggttgagttttgtttaggttgaaattagtttaaaatttaaggatgaggtgtgattatgttattttttttttgaagttattttttaaggagatgataagtgaaattgtggtgaatattttttttttttatttttgggattttgtgggggatggtgtttttttttttttaggattgtttgtttgtttatttttgataagttttaattttttttgattagatggttggtttttttaaggtttttattagggaggtttttttagttggagagagaattttgtttttaattgagatttttttattttaaaaagattatttgtgtatgtgagttgtttttaaatgtttttttgtagaaaaattgaaagtagaaagaaaggaagtaatttttgagtagatgtttgattatttttttttgtatatttttagtattgggttatagggttttgggagtttttatttatattttgtggttttatatggatggatttatagtttttttgttttagtttgtgtgtgatttttgaatgttttttggtatttttggattttgtttttttgtatgtttgggttttaggaggtggggagggtagtggtgtaatataatgatatagggataaatattaagttgtgatattgatgtgtttggtgtttttttttttttgtgtttttggtatattttgggttgtttggtatgtttttttttgttttattgtgttttgtgttgtttgtttatttttgaggggtttttgtaatttttttgtgtgaagatggttttagttttgtagggaaagaaaagtaattttgttttttttggaggaattaggaaggattaagtggtttgggagagggtaggagtgtgtggagggtagtgatggaggttttgtaaaggaggaggaggggagtttggaggaattttgaggaaggtttttgggttgtttgattgtattttttttttatttttttgtttttttttttaggtgtaatgattttggattgagatgtgtttgggtagaggttatgtaattgtgtttgtgttgaggattttgttttgaggagggaagaggagggattggtttgtttttttggtggtggtggtggtggtgattttgtaggtggagttttgtggtggtggtattagggttatgttagttttgtggggaggtttttttatttagtttttgtagtggtgaaagttttagtgtttgagtgtttgagttggtggggagtaagtaaagttagattgatttttggggagttttggagtaggtgagtggtggttgttagttagttgagtgtattttttgtttgttttagtggtgttgtggtgggtggtgtttaggtggtatggagaaggatggtttgtgttgtgttgattagtagtatgaatgtgtggtggagattggggagggtgtttatgggaaggtgtttaaggtttgtgatttgaagaatggaggttgttttgtggtgttgaagtgtgtgtgggtgtagattggtgaggagggtatgttgttttttattatttgtgaggtggtggtgttgaggtatttggagatttttgagtattttaatgtggttaggtgagttagggagttgtgtttttgttatttggggttttgtgtgtgtggggagggttgagttgggaatttttaggtttagaaaggtgtggggtagagggtgattggggaggttttgtgtgatttgttggttttatagagtgagagttaagttttgttgatagagttgtgagttagagttggtgattttgttagatagtgagttgaaagataagttaaaaaaatatgatttgagtaggtttttttgtagttgtgtaatttagaagtgttttttttttgtttattttgaaggagggtttgggggaagtgggtgtgttttagggataggataagttaatttgagatatgttttgttagtttttgtatattttttgtggttatgttgttggggaatttttgaaagatagagtaggtgagattggagaatgaggatgttgtgtgataattagtgggaattttatgggtggagttaagtgtaaattaggttaataagatgtagaaatattataatatttttgttagttatatttttagtttttttttattaaagttgtgtagtaagaatgatttttggtggtttaaggagtttgagtgttgatgtttaattttaaatagtgttataaaaattttttttaaaattgttatttttgtgtttgttttattttatatttttgggtggatatattttttagattaattttttaaagggttaaatgtgagtttaagatgtggtatggttagattataaatgttttgtttatgttttttttagatggattgtgtgagtgggtggggagatagtagtttttatttttttttgtgtggtaattagtattaaatgaaaatgtgtgatttaggataatggtgtttttttagtgattttggaatttttttattgtgtggttgatattgtttggttgtgttattttttttttttttaaatagagatgtatagttttatattgaaaaggaatgtttagaaatttttgtaaattgggttgtgattttattttttttgattttgagaaaatgtgtagtagaaatatttttttttttatttatttagggtttttgtttaataaatatatgtttattgtgtgtgttgaggatgaaatgatgtaaataagtatagttaaatatttttgtaaaaagttaaataatttaatattagttattaaagtggagagatttaagattgatttttgaaatattaaattttttatagatttagagagattaaatatttatagaatttttttgggaggttttaatttgtttttttttattttaggttggtgatttgtgtggtgttttgtttttaatgtagtttagatttaagttagaaggtattaaagaattataaatatataaataaggtagtaaatggttataaagttaagattgtattatattttggtttagttagtgaaggagaatgagtgttttagaagatgagattatatataaaaatttatagatgatttttttttatgtgtattttatttgttaaaaataataaaatttgtttttggggttttttgtgatattggagggaaaaggggagggtatatttagttttttgtaatttagttgttgttttaggggaattatttaatatattttgaaggatgaattttattattataattttaagatggaagtttttgttttattttgtttgttatttatggagtatttagttaagggtgtttattatgtatatgaatgaatagtgtttttttaaatgtagaggtattatagaggtatttttgtataatattattgtttataaagtttatgttatttttatattagaggtatattttttgttattgtgtttgtagattttgtttgatttattttatttttttgatttatttttttgagattgatgtgtttttagatgtttttaattgatttatgatttggattttgtattgtgaattttaggaggatatttttatgaattgaagataaaggtattgttttttaaaattatttttatgtgttaaggtgatgatggtatttatttgttaaagttgtgagaataaaatgagatggtgtatgtgaaagtattttgtaaatttgaaagtattttagatatttaaaggattgtttgtgttttagtagattgatggttttttgttatggagtagttttatagggaggggttaatttatttgattttttttgtagaataaattatatttaaatttagatattataggttttggaattaagaagatttttgaggataattagtttgtaagatgttagaaaagatttttagttatgagttatgaaatttagtgatatttgaggaaattattgatgatgttatttttatgagttatagatttttattttttttttgttttttttttgtttttttttttttgtttttgttttgaaataattattggtttttatgatttgtttggttagattaagaattttggattttagaggttgtgaatatttgtttagatagggttaggaaataaggatagttgatagtaatttttttttttttaagggagagttgttaaagttgggtttttaaatttgtgatttattattgtttttgggattagttttatagttttaagtttggttttttaatggttttttaaaagggtagatgtttttataagtatttttaagttataagtaattgattataattataggtttttttttatagatagttaagtttttaagttaataggagtataataaatatattagtttttttaaaagtttaagatttaattttgatggatttgttagaaaagttgatttgttattgttggtattggtattgtttgtatgtatagggataatgatttgaaatttttgtttatttgtatttgatgtattttaggtttttgtttgattagttagtgagtgtttgggaagtaaatttattttttttttatatttggtaattttaaattttggaatttttgttagaataggattttattgtgaatttgtattggagtttttgtattgtataaatggattttgtttgaatagtttgaattaaaaataatagagataaaattatagtatgttttgttagtagtttgtttatttattaaatatttattgagggtttattatgtgttagatttttttagaaggtggggat

SEQ ID NO: 676 - DNA, 6243 bp, Artificial Sequence
  chemically treated genomic DNA (Homo sapiens)
ttagggttgtgtgtgattagtagatgtgttggaagtgatggtgtgttatttttgaggttaggttattaaagatgtagtggtttttattttgtgtgtgtttttttttttttgggttatttgttttggggaaagttagttgttggggtttgaaaatatatatgtttgggaagaggttgtattggtgagggatggaggtttttagtttatagttgtgggaatgtgggaatgaattttttaggaagtgaattttttggttttgttttagtttttagatgatttagttttggtagtattttgatggtaattttataagagagtttgagttagattatttagtttggttttttttggattttagatttgtaggagttatgagtttttttgttgttttatatattaaagttttgaggtaatttgttatatagtagtatataattaatatattagttgtagggttttgggtatgttttttagtttttgtatttttgtttttttttttgtgttatgagtattgtagaggtgagtgaggaatatgtagatgtagtatagtgttatgtatatgaggtagttttttagttttttttgggatggttgtggttatttttttgtttttttttggatggattgtgattttataatgttaggttaagttattgtatttttggtttgaggttatttattggttatagatagaggtttttggtaggaaagggtgagataaagagaggggttagttttttttttttagtttgggttgggagaattgtgttgggttaggtgagatatttgttgtttgtgtggtgttttgggatgagttattggatttgatttatggggagatttgtttgtgttgttagagggtgaggggttttttggtttagtttgttttgggtttggttaagtattttggttgttattggggtttttaggataattgagaattgtttttttttttttgatttttagttgttttttttttttttgttttttggtgtttgtttagatgttttttttttgtgatttttgatttttggtttttggtttttgttttgaggtttttttattttgggttttgtgttttagagtttattgtgtattagttttttaagttgtttgttttttattgtttttgatttttttgtgtattatttaagaattgtatgggtatgtgttagtataaaaaaaaataaagttggttgggtgtggtggtttatgtttgtaattttagtattttgggaggtagaggtgggtggattatgaggttaggagattgagattatggtgaaattttgtttttattaaaaatataaaaaaattagttgggtgtggtggtgggtgtttgtagttttagttatttggagaggttgaggtaggagaatggagtgaatttgggaggtggagtttgtagtgagttgagattgtgttattgtattttagtttgggtgatagagattttgttttaaaaaaaaataaagttggttgggtgtggtgatttatatttgtaattttagtattttgggaggtggagatagatagattattggagttggagattagtttttggttaatatggtgaaattttgtttttataaaaaaatataaatatttgtttgtgtgtggtggtatatgtttgtagttttagttatttgggaggttgaggtaggagaattgttttaatttgggaggtggaggttgtagtgagtagagattgagttattgtattttagtttgggtaatagagtaaatttttattttaaaaaaattaaaaatttaaaataaaaaaatataaaaaaatattattgatattaataattataaggtgtttggttaattgtatatttttagtagagatagggtttttttatgttggtaggttggttttgaattttttattttaagtgatttgtttgttttgatttttgttttttaaagtgagttattgtgtttggttgtgaatgtgatttgatagtttagatttttttttgtgaatgtttgttagttgtgaaattagtaaagttgtgtttttgagtttatgtagagttggttttggaatttgagttttgggtttgagtatagttttgttgttattttgggtgtgattttggttggagtttggttttttttgagttttagttttttggtttgggatgttggaatgatagtttgttttttgttttgtttagttttgtttagttttgttttgtaggttttgggattggtttgtgtgaggtttttttttttaggtggggttgggttttttttgtttgttaggttttaatttggaaatgtagttggagtggaggtggagtttattaaggttgtggtggagtgatgatgggtgtggttaatgggtgtgggtgttggttgtggtgtgatggaagttttgtttggtgttgtgtgggggtggggtggtgttgggggtggggggtggtgggtgatggggtgggtgtaggatgagggtggttattgttggggttttgttttggggaggaggatgttgaggaggtgttgagttgtgtagtgttgtgggggaggtgtttgtgttgatgtggggtttatggttaggattattagttagttggtgagtgtgtggtggtggattggatgtgttggtttgttattttgttgggtttggtggttgtttgggtttggtgaggtggggtggtttggggttttgagggttgggtgtttttttatttgtagttgggtggttgggttggggatggtgggtgttggttgagggtgttgtttggttgtggtggggagattgggtttgggttgtggtgggtggtggtttggttgggggtgttgatagatgtgtggagggtgggggaggttgggaggtgttatttggtttagtggggtggaagtgtttggaaagtttgtttttggtttggtgtagtttggagttgagtttttagggttattttttggttttgtttgtagaggaattgttttgggtttttatttggaatggggtttttggtgtttttgtttgtgagagaagtagaaggtgtaagtttttgttgaaagtatttgatgtttttgggtttttttttttagatttttgatgatagtggttgggaaaatttgttttttatggtttggttaaggggtatttgggtgtttttgttgtttgtggttgtgtttagtgttgtgggaagtttttgggaggttgaatgtgtaggattattgaggggaaagtgagtttgataggtaggagggattttaggggaaggattaaaataaattatttgttgggtgaaatgttttgttaaaagtgttgttggtgtttttatattttttttttattgttaaaagtattttttgtgtttttatgttttttatatgttaagttttatagtttggggatgatggtttaaaaatttatgttttgtatgtgatgtgtagtgggtgatggaagaatgtttatatggttttaatatttgatttaaaaggtaaatattttaaatgaaggaaaatttaagaaatttaattgattttgtgttttttaggatgtggtttttttttttttttttttttgatggagttttttttttgatgtgtaggttggagtgtagtgatgtgattttagtttattgtaatttttattttttgggtttaagtgatttttttgttatagttttttgagtagttgggattataggtgtatgttattatgtttggttaatttttgtatttttagtagagaaggtgttttgttatgttggttaggttggtttggaatttttgattttaagtgatttgtttgttttgtttttttaaagtgttaggattataggtgtgagttattatgtttggtagatgtggttttttgataggtgtttttgatttttttttttgtggggtggggagtggggggttgtgagtttgtttgagaatttgaggaaaggtatgggtttttttttgagaaaaaggtagagtgatgttgaattttgtaattatgttaggaggtttttgaattttttgtagtttatttgtggattttgtagagatgtgtgttaaggaagaaggtttagttgagaaaaatgttgaagggatgttttttgttattttgatatgtgtggttgtatattagagtggtttgggtaatataaaaatatgaattaggtggattggttaggtttagtggaggttggggttgagagttatgttgaagtttgtgaggttaatttgtatttagtgatagttatggtgaaatttgtgaggttaatttgtatttagtaatgttgttttaatgtaaggtgtgtatttggtgttatttatgggaagaggaaagagtaaatttttttatggttttggtagttttatatgatggatattttatatttgtagttttttttgtatgagatggtttttttgtataaaaatattggaatttagtgagtaagaatgatagaatgtaagatggatttttatatgaggaagtgttatgaatgagtgttttgtatttgttagttggatttttttatgtgtatgtatgtgagaatatgttgtgttttttgtttgtaatggtagaggtagttttgattttggatttttatttgaggatggatagatttttagggtttaagtgggtttgtatttggattttagggtggttttgtaggttttgtgtgagaagttttttttttagtgaatttttttttgtgtgtttgtgtggatagttaatagggggagtagtgtgagtgtgaaggtagatagtggtttggtttagtttgatgttaagtgggttagaggtagtgagtattattttttgatttgattatttaagataggtgtttttttaggtatttttatattttattgtgaggtaggtgttgtttttattttatgggtgtagaagttgagttgtagaggtgttaggtatttgttttataagtggtagagattttagtgttattttgttttttatgtttggagtttttgagggagggtttgttgggtagtttagtttagtattttgtaaggaaatttttagtgttattgtttaggatgtttttttagggattgggtttgaatgttttgattatgttgtgttggaggtaggaggggtgtttttatatggaagaattgtatatatttttttggtagatggttgaattttgtgattttggggtttgttttagttttttgttgttagaaagtagttgtttgggaagaggttgtgatttggttttgtttgagggttgatattttgaatgggtgaggtttgaaattttttttttggaataaagaaatatgtaatgattttgttgaaggtagaattgggggattaggtagagtggttttttgttttttttagggtggttttgttttttgtaaaggtggttgtatttttaggggaaggtgaggggagaagtagggagtatggagagaagtggtttttgattttttttttttttttggggagtttttttttatgtggttggtttggtgtatagtgtgatgtatttttgtatgtaatgttgttttgatagttagtttaagttgagtttagagttggtaaggtgagtttttagtggtaagagggaagtggtttgttttgtttttttgagatgtgtttttatgagaaggatttagtagtagtttgtagagatgtggggtttgaaaagaggttttgggtagttttttttgataggttttggttttttagattgtttttagtatagttttggggagaaatagggagtgttttttttttagtttatgtatttattttttgagttgtttgatttagggtttagatgttttagggtagttgattgatattggtgggagatggagtttggtaagtaggtgatgaattgggaagtgttgtagaaatgagggggtaagtgtggttagttttttttgagaggatgtgtttggaagagagtgggtattggtgtggtattttttttttttgaggaaatggataggatgttatgtggtgttgtagttttgtgtggggtaggttgtggttgtagagaagttttgggtgtagaaatagttttttaagtaggtgtgagggttagggtgttttatgttgttttatatttgttgtgtgatgatatgtggttattgggttgtttagtatagttgtttagaaagtaggtttaaagggtagtgtgttgggaggaagtgttgttgtggaaattgtaagttttggatatgagttgtttaggtttttttagttgtgtatttttttatagtagaattgtattatttatttgtttagtg

SEQ ID NO: 677 - DNA, 6243 bp, Artificial Sequence
  chemically treated genomic DNA (Homo sapiens)
tattgagtaagtgaataatgtaattttgttgtagaagaatgtatggttgaaaagatttgagtaatttatgtttaaaatttgtagtttttatagtagtatttttttttagtatattgttttttgaatttgttttttaaataattgtgttgggtagtttagtggttatatgttattgtatagtaggtgtggagtagtatagagtattttggtttttgtatttgtttgggggattgtttttgtatttagggtttttttgtagttataatttgttttatatagaattgtagtattatgtggtattttgtttatttttttagaaggggaaagtgttatgttagtgtttatttttttttaaatatatttttttagaagggattggttatgtttgtttttttatttttgtagtgttttttagtttattatttgtttgttagattttgttttttattggtgttaattagttgttttggagtatttaaattttgggttaggtggtttaggggatgagtgtatagattgaaaaaggaatattttttgtttttttttaaaattgtgttgaaggtagtttagagggttaagatttgttaagaagagttgtttaaggtttttttttaggttttatatttttgtaggttgttgttggattttttttataagaatatattttagaaaagtagaataaattattttttttttattattgggagtttattttgttagttttagatttagtttggattggttgttagggtaatgttgtgtataggaatatattatattatgtattagattagttatataaggaggaattttttaaaaggagagagaaaattgaaagttatttttttttatgttttttgtttttttttttatttttttttaaggatgtagttatttttgtaaaagatagaattattttagggagggtaggaggttattttgtttagttttttaattttatttttagtaaaattattatatgtttttttgttttaaagggaggattttaagttttatttatttagagtattggtttttaaataaggttgaattatagtttttttttaaatagttgttttttgatagtaggaggttgaaataggttttggggttatagagtttagttatttgttaaagaaatatgtatagtttttttatatgaagatattttttttatttttagtatggtatggttaagatatttaggtttaatttttgggaagatattttgggtagtggtattgaagatttttttatagagtgttgggttgagttgtttggtagatttttttttaggggttttgaatgtgaggggtagggtgatattggagtttttattatttatgaggtaggtatttaatgtttttgtagtttagtttttgtatttgtaaaatgggaataatatttattttgtaatgaggtgtgaaagtatttagggaagtgtttgttttgagtagttagattaagaaatggtatttattgtttttggtttatttagtattagattgggttaggttattgtttgtttttatgtttgtattgttttttttgttggttgtttatgtggatatataagggaaagtttattgggaagggggttttttatatagggtttatagggttattttaaagtttagatgtaaatttatttgaattttgaagatttatttatttttaggtgaaaatttaggattagggttgtttttattattatagataggaaatatggtatgtttttatatatgtatatatgggggaatttagttgatagatgtaaaatgtttgtttgtgatatttttttatgtggaaatttattttgtattttattatttttgtttattggattttagtgtttttgtgtaaaaaagttattttatgtgaagaaaattgtagatatgaaatgtttattatgtggaattgttaaggttatgagaaaatttgtttttttttttttttgtggatgatattaaatatatattttgtattggaatagtgttattgggtgtgagttaattttataaattttgttatgattgttattgggtgtaggttaattttataaattttgatataatttttggttttagtttttattgagtttggttaatttgtttaatttatgtttttatgttatttgggttattttggtgtatagttatatatgttgaaatagtgaaaggtatttttttaatattttttttagttgaatttttttttttaatatgtatttttataaagtttatgagtgagttgtagaaagtttaagagttttttgatgtagttataaaatttagtgttattttgttttttttttagaagagggtttatatttttttttaggtttttaaatagatttataattttttattttttgttttataaaaaaaaagattaagaatgtttattaaaaagttatatttgttgggtgtggtggtttatgtttgtaattttagtattttgggaggatgaggtgggtagattatttgaggttaggagttttagattagtttggttaatatggtgaaatattttttttattaaaaatataaaaattagttgggtatggtggtatatgtttgtaattttagttatttaggaggttgtggtaggagaattgtttgaatttgggagatggaggttgtagtgagttgagattgtattattgtattttagtttgtgtgttgagagggagattttattaaaaaaaaaaaaaaaaaaaagttgtattttggaagatatgggattaattaaattttttgggtttttttttatttaaaatatttgttttttaaattaaatgttaaagttatgtagatgtttttttattatttattgtatattgtatataaggtataaatttttaaattgttgtttttagattgtagaatttagtatatggaaaatataaaaatatgagggatatttttagtgatagagagaaaatatagaaatattagtgatatttttagtaaaatattttatttaataagtggtttgttttggttttttttttaaaattttttttatttgttaagtttattttttttttggtgattttgtatatttggttttttaggggttttttataatgttgagtatagttatgggtagtaaaagtatttaaatgttttttggttgggttgtgaaaggtgagtttttttgattattgttattaagaatttggaaaagggggtttaggagtattaggtgtttttagtaagaatttgtattttttgttttttttgtaggtggaggtgttaaggattttgttttaggtggaagtttagggtggtttttttatagatagaattgaaaggtaattttggaggtttggttttaggttgtgttaagttgaaaataaattttttaggtatttttattttgttgggttgggtgatattttttggttttttttgttttttgtgtgtttgttagtgtttttggttaggttgttgtttgttgtaatttaggtttggtttttttgttgtagttaagtagtgtttttggttggtgtttgttatttttggtttggttgtttggttgtaggtaaggaggtatttggtttttgggattttgggttgttttgttttgttggatttgggtggttgttggatttggtagggtaataaattggtgtgtttagtttgttgttgtgtgtttattagttggttggtggttttggttatgggttttgtgttggtgtgggtgttttttttgtagtgttgtgtggtttggtgtttttttagtgtttttttttttgaagtggagttttagtaatggttgtttttattttgtgtttgttttgttgtttgttgttttttgtttttggtgttgttttgtttttgtgtggtgttgggtaggatttttgttgtgttgtagttgatgtttgtgtttattggttgtgtttattgttgttttgttgtggttttagtgggttttgtttttgttttagttgtatttttgggttggggtttggtgggtgggagaggtttgattttgtttggggagggggattttgtgtgaattaattttagggtttgtggggtggggttgggtggggttgggtggggtagggggtgagttgttattttggtattttagattgggaaattgaggtttagaggggattaggttttggttaaggttatgtttgaggtagtggtggagttgtgtttgaatttggaatttggattttggagttggttttgtgtaaatttagaggtgtaattttgttagttttataattaataagtgtttatggaaggaaatttgggttattaagttatatttatggttgggtatggtggtttattttgggaggtggaggttgaggtgggtggattatttgaggtgaggagtttgaggttagtttgttaatatggagaaattttgtttttattaaaaatatataattagttgggtgttttgtagttgttaatgttgataatgtttttttgtgtttttttgttttgggtttttggtttttttgagatggaaatttgttttgttgtttaggttggagtgtagtggtttgatttttgtttattgtaatttttgttttttgggttgaagtgatttttttgttttagttttttgagtagttgggattataggtatgtgttattatatataggtaaatgtttgtatttttttgtagagatagggttttattatgttggttaggggttggtttttaattttagtgatttgtttgtttttgttttttaaagtgttgggattataggtgtgagttattatgtttggttaattttatttttttttgagatagagtttttgttgtttaggttggagtgtagtggtgtgattttggtttattgtaagttttgttttttgggtttattttatttttttgttttagtttttttgagtagttgggattataggtgtttgttattatgtttagttaatttttttgtatttttagtagagatagggttttattgtggttttaattttttgattttgtgatttgtttgtttttgttttttaaagtgttgggattataagtgtgagttattgtgtttggttaattttatttttttttatattgatatatgtttatgtagtttttgagtaatgtatagaaaaattggaagtagtgaaggataaatagtttgaggaattagtatatagtgaattttagaatatggagtttagggtggaggagttttggggtaggggttaagggttaagggttaagggttataagaagaaagtatttgagtaggtattaggggataggggagagaggggtagttgaaggttaaagaagaaaggatagtttttagttgttttgggggttttagtggtagttagaatgtttggttaagtttaaggtaagttagattaggaaattttttgttttttggtgatatagataaatttttttatgggttaggtttagtggtttattttaggatattgtatagatagtggatgttttatttggtttagtatggtttttttgatttgggttggaggaaagagattgatttttttttttattttatttttttttgttgagaatttttgtttatggttaatggatgattttaggttaagaatgtaataatttggtttgatgttgtgaggttatggtttatttagggaggggtaagaaaatgattataattattttgggaggggttggaaagttgttttatgtgtgtggtattgtgttgtgtttatgtgttttttatttgtttttataatgtttatggtatgagggaggaaatgggggtgtagaggttaaggaatgtgtttaaagttttatagttggtgtattagttatatattgttgtgtaataaattgttttaaaattttgatgtgtaaaataataaagaaatttatggtttttgtgggtttggaatttaggagaggttaggttgggtggtttggtttaggtttttttgtgaagttgttattaagatgttgttaggattgagttatttaaaggttagagtagggttgaaagatttattttttaaaaggtttatttttatgtttttatagttgtgggttggaggtttttgttttttattagtgtggtttttttttaggtgtgtgtgtttttaagttttagtagttggttttttttagagtgagtggtttaagaaaaagagaatatatataagatagaagttgttgtgtttttaatgatttaattttagaagtgatatattattatttttaatatatttgttggttatatataattttgg

SEQ ID NO: 678 - DNA, 6220 bp, Artificial Sequence
  chemically treated genomic DNA (Homo sapiens)
aatttagatagaattagagaattagatggagatttaaggagataagggagagatatagagagaataaaagttagagtgggggttgggtatggtagttgatgtttgtaattttagtattttgggaggttgaggtgggtggattatttgaggttgggagtttgagattagtttgattaatatggagaaatattgtttttattaaaaatataaaattagaaatataaaattagttaggagtggtggtatatgtttgtaattttagttatttgggaggttgaggtaggagaattgtttgaattttggaggtggaggttgttgtgagttaagattgtgttattgtattttagtttgggtaatgagagtgaaattttattttaaaaaaaaaaaaaaaaaaaaaatttagaaggggaaatgtgtaatgaaagatatagatatttggggttttatagttagagattaaatgagggatggttaattaagggtatagttattgggtatagggttagggtgggaggtatgggagggttttgaaaatatagttatatatttttttaggtttattttttttattttgtattttggtattttaatgttagttttttaggatttaggattatttatattaaagttaagtttggtttaattaagatagatgtttggtgggtggggttgtttgttggagtaataggtttttgtaggttttggaggagaagtttagagaggtggttgtttggaagagagtaggtaggatttttttttttaagtaggtatttttattttattaggtgtttagatgttagtgtatggtaagggtggttttttgttttttagatttgggtgagaggatttgaaaatttgaggaatttgtttttattaattgatttttatatttgtttgaagggaattgttggagggtataggtgttaagtgggatttatttaaatgtggtaatgggtttgtatttagttattgataggttgtatgatggtggtaaagttattttttttttttggtttttgtttttttatttgtaaaattatttttatggttatttttagttgtggtatttggtttttattttagttgattttttagttttgtgtttgatttttttttgttaaatttattgtttagagtgggaaaggagaggagagggattatatttttttttttttggggttttttgtagagtatttgggaagtaaggtttttttatattttttatgtatttttttagagtttttaatttttttttttgtgattttgttaattaagatattgtgattatatagagaaggtggggagaatgtagatattttggtttttgtagttttgaagtttttttttttttttttttttgaagttaaaagaatgaaattgggagaggtagtaaggggtaagaaaggagagtggaaatggagagaaaagggtagttttgagaagtagttggggagggaggtagatgagaatgtattttttttaatagaatatgtagttttggtttagttgtgttgtgagtgggtagttgggttggttttttttttggtgttgttaatttgttgttaggtagaggggaggtttagaggagagggaagttgggtaaaggggatggaaggtgtttagtttgattttattaaattttttgggttttgtgggaaggggttttttggagagggggattgaggttttagataggatatttattgttgtggtaaggtttgtagagagttttgaagttaggaggatttaagatggtttttttttggatttttttgaaggtagaattagttttataagtaattaggttgggtgaatgggggtgttggttagtttatggattatagttggttggtgaggttatgtgtttattgtgtggttttgggtggttttgggtaagttttttttttttttaggatttttattttttatttgtaaaattgtggagagggggagggttgaaatatatgattgttaagattttttttagtttttttgttagggttgagtttagatggttggagtaaaagaaggagggaggtgttgtggtggtgggggtgattttggttttattagaatttttagttttttttttttttatagttttgtttttgaggttataaaatttgtggtttttaagatatatatgtgtatatatgtgtgtgtatatatatattttatatatttattttttaatttaggggtttaaaagatgatatgtgttagagttggaaggtgttgttaattggtttattttttttttttttttttttgtggatgagaaaattgaggtttaggtttgggatttttagagtttgggattttttggtaatgtttgataattatatttttttggttattttgatttgttttggttttgggatgttttttgggagttgttgttgagggtttgttgggatttttgggggattttgttgttggggtagtttttatgtttggtgttgtttgttgggaatggttgttgttgttgtgtatttgtaggggagttggtgattgagggtgaggtagggagggagtaagtggggttgggagggttgttggtgtgggtttgtgtgttgtgtatggtttattgtaggtagttgatttttgaggaggaaattgttgttttttgtttttttttgtagtaatagttgttgttgttgttgttgttaggaattttggttgggagtgagagttgtggggtgtagagttggtttggttgttggatggtgtggttttattaggtgggtgatttggtggtgtgtttttggtggtgtgttgagaggggatattttattgttgttttggtatttttggtatttggagtttgatggttgggtgtagtgtggggattagtttttggtattgtgagggagttggtttagtgtagatgagggatggggggatgtggggataggggttggggatgaaaggtagaggttagggagggtgttgttttggtatgttttggagagggagtatttgttgggttggatttggggaggtattagtgtatagatgggggagtagttgaagaggggagtgtttaagtttttagttttgttttttgaatagttttagttatgtgtttgaaaagttttagttgttgagtgggagttgttgtggtgttggtttaattttgggttggaatattttttttttttagaaattgggtttgaggtgggttgggggatttttgtagttttttttagggggtttgtgggttttttgttgttaagttttttttttagtttttggttgttttttttattagggaagttttggtggggtgaggggagaggaagatggggagggtatttgtttttgtagagtattttttttttttttttagtgggttttttgttggaggggatgggtggttttttattttttattatttttgtttttgtataggaaagttatttgtgggaggggaggggtttggtttggttgtggtttagggataggtaggtatggtaaggttaggggtaggtttggttttttggtttttgtagaggagagtgttttagtgtttggtttgttttaggtgaatggttatggtgggttggatttaggtttagtagttgtagggagatgtgttgtgttagatgtaggtgttgtatggttagtatttttttattgaggtttggtattatttggtttagtggattgagagttagttatggtaggtatgttttgttttgtttttttttagagggtttttattatttaggttttttggtttttagttttatttatggtggtttggtgtgattttggttttgtttgtttttttttgtgtggaaggggtggtgtttttgggaaaggggaagtttgggaggatagagaatgtttttagatttggatgtttgtggagttgttgggaataagttttgtgggttttggagtgtttttggttatgagtttggggtttttattttattttagttttttgatttttttgtttaaggaggtgttatagtaggttttttttttttgttttgttttaagggatgttattgatttggataatttttaggatagagtttaagttatttagtttttggagggtttggtgtaggagttgtagaagaaggtggagtattaggtgggggaagatgggtttttattgaagattaagttggggtattatgttatgtagttttaggtgggtgtaggttttgggttatttatggggaggaagtattattttgttttagtattagaatttttgggtttttttttggtttggttattgatttattatgtgattatgaatttattgggaatttttttttgattttttttattttttttttttaaatttgatttgttggatttttttagtatattgtaaagtaagggtgggaggtgtttgttgttaatagagagagatgggtgaattggttttatggaagtagtagaagggatggagggagattgagttaggatttttatgttggagaagggaagattagtagattttagaaatgaggttattagattttttttttggggttttttaaaggtgagagaggagttattttagagataagagttggatataagggttttgaattgagggtttagaaataagatgtagtttttttatttgaggggagtgggtatggaggaagagagggagtttttgtggaagtaggaaaggggtgtgggtagtgatgatagttaagtatttattggaatttatgtatgttttttagagagttttttaatatagatagtagggtgttagggaaatataagtttattttagaagagggggaaaataggagaagtttgaggggaagtaatataggaggttaggggtaggatggtgggaagtattttgattttggtattagatgttttgagtttggagttatttgtttttttatttggttgtgtttggatgagtatataatgtttgagtattagtttttttatttgtgaaatggggattatagtttttgtttatgttttagagtttttatgttgttagtgttttgattttttattattttttggtattagggattggttttatggaagataatttttttatggattgggattgggtagggaggtggtttttggatgatttaagagtattatgtttattgtgtattttatttttattgttattatattgtgttatgtaatgaaataattatagaatttattataatgtaggattagtgggagttttgagtttgtttttttgtaattagatagttttatttgggggtgatgggagatagtgatagattattaggtattagatttttttaagaagtgtataatttagattttttgtatgtgtagtttataatagggttagtatttttatgggaatttagtgttattgttgatttgataggaagtagagtttaggttgtaatgtgagtaataggtagtagttgtaaatatagatgaagtgttatttatttgtttattgttgtttattttttgttgtgtggtttagtttttaatagattattgatttgtattagtttatggtttaggggtttgggatttttgtgttatagttaaaagatatggtagattggaagtgttttataagattgggtatgatggtttatatttgtaattatagtattttgggaggttgaggtgggtggattatttgaggttgggagtttgagattagtttgattaatgtggagaaattttgtttttattaaaaatataaaattagttgagtgtgatggtatatgtttgtaattttaattatttaggaggttgaggaaggagaattgtttgaatttgggaggtggaggttgtagtgagttgagattatattattgtatttttagtttaggtaataagagtaaaattttattttaaaaagaaaaaaaaaaaaaagagaaagtgttttataaattgtgggtttttaatttgttttaaattagatatgaagattttggaggggaagatgaggatgaggaatagagatatagaggtgtttggggatagtttttgaggttttttgggaaaagttgaggtagaggttgaaggagaggaagggttgggtatagtatggggttggtatggttggagtagaggatggtgttggaggttattgttggatttttttagaaaatatatgattgttgttttttggagttggtttgttgtatttggtatattttgtataatgaatagaggttggtttgagaagttaataatgtgagtgttttttggg

SEQ ID NO: 679 - DNA, 6220 bp, Artificial Sequence
  chemically treated genomic DNA (Homo sapiens)
tttaagggatatttatattgttggttttttggattagtttttgtttattgtatagaatgtgttggatgtagtggattagttttagggggtagtggttatatgttttttgaaagaatttaatagtagtttttagtgttattttttgttttagttatgttagttttatgttatgtttagtttttttttttttttagtttttgttttagttttttttagggagttttaggaattatttttagatatttttatatttttgttttttatttttatttttttttttaagatttttatatttggtttggagtgaattaaaaatttatagtttatgaggtatttttttttttttttttttttttttttgagatggagttttgtttttgttgtttaggttaaaggtgtaatggtgtgattttagtttattgtaatttttattttttgggtttaagtgattttttttttttagttttttgagtagttgggattataggtatgtgttattatgtttggttaattttgtatttttagtagaggtggggtttttttatgttggttaggttggttttgaatttttgattttaggtgatttatttgttttggttttttaaagtgttgtgattataggtgtgagttattatatttagttttatgaagtatttttaatttattgtattttttgattgtaatataggggttttaaatttttgggttatggattggtataggttggtggtttgttaggaattggattatatagtaggaggtgagtggtggtgagtaagtgagtgatgttttatttgtatttatagttgttgtttattgtttgtattatagtttgaattttgttttttgttagattagtaatggtattggatttttataggaatgttaattttattgtgaattgtatatgtgagggatttaggttatgtattttttaagagaatttaatgtttggtgatttgttattgttttttattatttttagatgggattgtttagttgtaggaaaataagtttagggtttttattgattttatattgtggtgagttttataattattttattgtatagtataatgtaataataatagaaataaagtgtataataaatgtgatgtttttgaattatttagaaattatttttttgtttaattttggtttatggaaaaattgttttttatgaaattggtttttggtgttaaaaagtggtgggggattaaggtattaatagtatggaaattttaggatataagtagaaattatgatttttattttatagatgagaaaattgatgtttagatattatgtatttgtttagatgtaattaagtgagagagtagatgattttagatttagggtatttgatgttaaggttaaggtattttttattattttgtttttggttttttatattgtttttttttaggttttttttgtttttttttttttttgggatggatttgtatttttttggtattttgttgtttgtattgaagggttttttaggaaatatatgtgagttttaataagtgtttgattgttattattatttatattttttttttgtttttataaaaattttttttttttttttatatttattttttttaagtaaagaagttatattttatttttaaatttttaatttaaagtttttgtgtttagtttttgtttttgggatggttttttttttatttttaaaagattttaagagggaggtttggtggttttatttttagagtttgttggtttttttttttttaatataggaattttgatttagtttttttttattttttttgttgtttttataaggttagtttatttatttttttttgttggtaataaatattttttatttttgttttgtaatatgttaaagaaatttgataggttgaatttagaaagagggggtgggggaaattgaagaaaagtttttaataagtttgtggttatatggtgagttagtggttaggttaggaaaaaatttaggggttttgatgttggaataagatgatgttttttttttgtaggtggtttagagtttatatttatttggagttgtgtggtgtagtgttttagtttgatttttagtaaaaatttatttttttttatttggtgttttgtttttttttgtagtttttgtattaggttttttaggagttgggtggtttgggttttgttttggggattgtttaagttaatggtattttttggggtagggtagaagagaaaaatttattgtggtatttttttgggtaaggaggttagggagttggaataaagtggaaattttaggtttatgattgagggtattttagggtttataagatttgtttttagtagttttatagatatttgagtttaaaaatattttttgtttttttaggtttttttttttttaggggtattattttttttgtataaagaaggataggtaggattagagttatattaaattattatgagtaaaattagaggttaaagggtttggatggtagggattttttgaggaggggtagggtgggatgtgtttattatggttggtttttaatttattgggttaagtagtgttggattttgatggggaagtgttggttgtatagtatttgtatttggtgtagtgtgtttttttgtagttgttgggtttggatttagtttgttatggttgtttatttagggtgagttgagtgttgaagtgtttttttttgtagaggttaaggaattgggtttgtttttggttttgttatgtttatttatttttggattgtggttaggttaggtttttttttttttatagatagtttttttgtgtgggaatagagatggtgaggagtggagggttgtttattttttttaataaggaatttgttgaaggggaggggaaggtgttttgtagaggtaggtgttttttttgtttttttttttttttgttttattggagtttttttagtgagggggatggttagaaattgaaagagaaatttgatggtgggaggtttataggttttttggagagggttgtaaggattttttagtttattttgggtttggtttttgggaaggggagatattttaatttgaagttaggttagtgttatgatggtttttatttgatggttagggttttttgggtatgtggttggggttgtttaggagatagggttgaggatttgggtgtttttttttttggttgtttttttatttgtgtattagtgtttttttgggtttagtttgataggtgttttttttttgaggtgtgttaggatggtgttttttttggtttttgttttttatttttgatttttgtttttatgtttttttgttttttgtttgtgttgggttaatttttttgtagtgttggggattgatttttgtgttgtgtttggttgttgagttttgggtgttggaggtgttggggtggtagtagagtgtttttttttggtgtgttgttgaggatgtgttattgggttatttatttggtggggttgtattgtttggtagttgggttggttttgtgttttgtggtttttgtttttggttggggtttttggtggtggtggtagtggtggttgttattataggaaggagtggagagtagtgattttttttttaaaggttagttgtttgtgatagattatatatagtgtgtgagtttgtgttagtagtttttttagttttgtttgttttttttttgttttgtttttagttgttggtttttttgtaagtgtgtaatagtggtggttgtttttggtgggtggtgttgggtgtgggggttgttttgatggtggggttttttgggagttttagtaggtttttggtggtggtttttagggagtgttttggaattggggtgggttagaatagttgggggaatgtggttgttgggtgttgttgggaaattttgggttttggaaattttaaatttgggttttagtttttttatttgtaaaaagggaggagggaaaagtggattaattggtgatgttttttagttttggtgtgtgttattttttgagtttttagattaaaaaataaatgtgtggggtgtgtgtgtgtatgtgtgtgtgtgtgtatgtgtgttttgggggttataggttttgtgattttagagataaaattgtagagaggggaagaattggggattttagtgaagttaagattatttttattattgtagtattttttttttttttttattttggttatttaaatttaattttgatggaggaattggaaagaattttggtagttatgtgttttagttttttttttttttataattttgtaggtaagaaatggaagttttgagagggaaaggggtttgtttggggttatttagggttatatagtaggtatgtggttttattagttgattgtgatttataaattagttagtgtttttgtttatttagtttagttatttatgaggttggttttatttttagaaaagtttagggagggattgttttgagtttttttaattttgaaattttttataggttttgttatagtagtgaatattttgtttagagttttagtttttttttttaagaggtttttttttatgaggtttaaggggtttggtaaggttgggttggatgttttttattttttttgtttagttttttttttttttgggttttttttttgtttggtagtgggttggtagtattagaggaggggttagtttagttgtttatttatagtatagttgggttaagattgtatgttttgttggggggggtgtatttttatttgtttttttttttagttgttttttagagttgtttttttttttttatttttattttttttttttgttttttattattttttttagttttatttttttaattttagaggaaaaaaaaaaaaagaattttaaagttgtagaagttaaaatgtttgtgttttttttattttttttgtgtggttatagtgttttagttggtaggattatgaggaaaggaattgaaaattttaagggggtgtatggaggatgtagggaagttttgttttttagatgttttgtagggggttttagggaggaggaagtatagttttttttttttttttttttattttgagtaatggatttggtaggggagggttagatatagagttagggggttaattggaatgaaagttaagtgttatagttggaagtgattataaagatgattttataagtggaaaaataaaggttagagaggggaagtgattttgttattgttatgtagtttgttggtggttggatataaatttattgttatatttgggtgggttttatttggtatttgtgttttttagtagttttttttaggtaggtgtggaagttagttgatgggagtagattttttaggtttttaagtttttttatttaggtttggagggtagagggttatttttgttatgtattgatatttgggtatttgatggggtgggggtgtttgtttaagagagggggttttgtttgtttttttttaggtagttatttttttagattttttttttagggtttgtagaggtttgttgttttagtaggtagttttatttattaaatatttgttttggttgggttgggtttggttttagtgtgggtagttttaggttttaaaaagttagtattgaggtgttagagtatagaatgggaaggatgggtttaaaagggtgtgtggttgtgtttttagagtttttttgtgttttttattttgattttgtgtttagtggttgtgtttttggttgattattttttatttggtttttgattgtaaggttttgaatatttgtgttttttattgtatatttttttttttgggttttttttttttttttttttttgagatggagttttgtttttgttgtttagattggagtgtaatggtgtgattttggtttatagtaatttttatttttaaggtttaagtgatttttttattttagttttttgagtagttgggattataggtatgtgttattatttttggttaattttgtatttttaattttgtatttttagtagaggtggtgtttttttatgttggttaggttggttttgaatttttgattttaggtgatttatttgttttggttttttaaagtgttggaattataggtattagttattatgtttggtttttattttggtttttattttttttgtgttttttttttgtttttttaggtttttatttggttttttgattttgtttgggtt

SEQ ID NO: 680 - DNA, 6228 bp, Artificial Sequence
  chemically treated genomic DNA (Homo sapiens)
attttggttaggagggttttttagtttttatttttatgggtagagttagttgttattttgggtttagtagaaagaggatttagaatagaaaattttttttttttatgttggttatttatttaaagattttgtttaattggttggttttagagtttttatagaagagaggtttaaggtgagaagggatataaggtagtagttatttttaaagatattttagttgaatggttattgtttagtggtttaaaataggaagtatagggaataaaggttaataattttagtattttgggatgttgaggtgagaggattgtttgagtttaggagttttagattagtttgggtaagtaagattttgtttttttttttaaaaaaaaagaaatgttaggtgtagtggtttatgtttgtaattttagtattttgggagtttgatgtgggtggattatgaggttaagagattgagattattttggttaatatggtgaaattttgttattattaaaagtataaaaattagttgagtatggtggtgtgtatttgtggttttagttatttgggaggttgagttaagagaattgtttgaatttgggaggtggaggttgtagtgagtagagattgtattattgtattttagtttggtgatagagtaagattttatttaaaaaaaaaaaaagttagttatggtggtgtgtatttgtagttttagttatttaagaggttgagatgggaggattgttttagtttaggaggtagaggttatagtgagttgtaattgggttattgtattttagtttgggtgatagagtgaaattttattttaataaataaataaataaataaataaataaataaataaataaataaaaaataaagagaataaagggatatgaagtttttaattttagaatattttagagttttttgttatgggtaagttagtagtatgtaagtaaaagaatggggttagatgtagtagtttatgttattttgggaggtaggggtgggaggattgtttgagtgtaagagtttaagattagtttgggtaatatattgagattttatttttataaaaatattaataaattagttaagtatggaggtgtgtgtttgtagtgttagttagttgggaagttgagatgggaggattatttgagtttaggaggttgaagttgtagtgagttgtgattatgttattgtaatttagtttgggtaatatagtaagttttggttttaaaaaaaaagaatgggtaaggtatggatgtggtttatgaataagtgatttggggaatttaaggtagtttagggtatgtgggttttatatttttgatgaaatatttttgtaaagatatagttaatattttatatgtttataggtgttgtatatgtggattgtagaagaattttgggagtttggtattagagtgtaataatttaaagggaataggaagaatggatggggattttatgggttattatgaaatataatttgtttgattgaatatatgaagtatatgattttttaattgttatgggtaattatttttttatttttaattagaatttattttggtattatttttttattgattatgggtgtaagtgttatttggtagttgtagattttggttaggttaaagttagttagtttgattgttttattatttgttattagaatgttttttggttttagattttggtgaatgatgtaattggtatgaaggaaatttaggttttttagaaattggtgtattagattttagttttaaaggggaggtatagatgtattggaaattaggtattatatttgaaattttagaaggttttattataaaggttttaatttattttttaatgtttattaattttatttattttgattgttttggttggtaagtttggtgggggtgttttgtttagatatgtttttaggttttggtttatatgtttaaatattagggttattttgattttttggttagtttgggatgtggtatagatgtttattagtttgattagagtaaatgtttattttttaattttttttaatttaatatggttttttattatttttttagggtttttatttttttatagattattatattttatttataggttgttttttttttttattttttatgtttaattttttattatttttttattggataatattgggatgtttaaaagtttttagttgttttagtaaagttattttatgaattgtgttgatgggaaggttttttttatttttttttttattggggatttttatatttttgagggttataaagtggttattgtggggattatgggttttgtatattgttttataggtattgatattaattttagttattggtttatattgagaggtagttatttttagattaagggagattttataattatagatttttattattaaaagttgtttatagagttaggatggtatgagtttgtagtaataaagggatttttaaaaaaaaagtgtaaagaatattattagtattttattttttgtttttagttttttttggggttggttttagagataatataatgatttaatattaatttttttagttatgtgaggttttgtaatagaaaatgtttttttttttgggataattgtgttttgtataaagattatatatgatatatgttttgtattgaagattttatattttagtttttaaaattatatttttttatgattataaaggttttattttttgtttttgagtgatttttttataattagtttgtgaaatgaatgtgtggaaagttgtgaggggggtgggtattggtttttatttttgggaagggattgtatttattttatgttagtttggggtgttgtgggggtggtttgttattggggttttggagttggtttttatggttttatatatttgagtttggtttggagtagttggatgtagagggtttgattatagatataggttgtaagttagagaggtttttttatttttatttttattatgtgattagttgttaaagaggtgtgtggaaattgggagggtggggtgaatgttggatgttttgggtatgtgattgttatttatgtgttgaggggtggataggaggtgttttgattgggaggagggtgaagagtgtaagggggtggaggggtgatggtagttatgtgatttgttgttattatatgtgattgtttgatattgttttgaggagtagaggtgtggttatgtggtgggtatgtgattggttgttataatttttgttgtagggggggagtggtgagggggataagagagggtggagtttgaggtggtgttatggtaatttaggttatttagagtttaatttttggttgaaggattgttttattattggtttgaaggttgaattttagttttattattggttttttagtttgtttgtattggggagggggtgggagttggggtattagaggtgatgttgttatttttttgttttattatgagaaaatatatttttatttgtgttattgttttatttattaattttataatattttattgagtgtttgtttttagtgtgtatgtgggtttttattttgtttttggtgtttgttattggttttttaaagtagtggtatgattatttataaagatgtagttaataatggggttttttataatagggagtaaataatgtttatttgagggtaaaattatgattaaaggatgatggaaggtagattaatatagtaatttaataggtttagtgataaggtaatttttttatttttttaatttttaaatttttttgggagtgttaatgtaaagatttgaggttatttggtagagaagttattgatgagtaggagataggaatatttgattttttaagttttttttttttttttagtaggaaggttttatgattatgtgatatttgtatgtgtgtatatatgtttttatgtatatatgtatgtatatgatattatttattatattatatataagatggatataggattgtatatgtgtaagaaagttattattatattttttgtattttttagattattataatgaatgaaaatgatatgtttttttttgtaaattttgtgattatttatttggagttattgtgtttttttttttttttttagtgttgtttttttagtatttagtattgtttagaatatatttgtttttaaatggtttttgtttagatatttaggtagatataagtagattttttttattttgttttattggttttaaggtttttattttttagttttttgggggtatgggagtaaaggaggaaagtggttagtgttttatttgtgagaatttgtttaaaatttaaagttattttattattttatttgttattttttttattttaatttttgttttttttaattatttggttgagaatataagagtttaaattagaagatgaatataaattatgatttagagtaaaatagaatatatattaatatagatgttttttttttttattttgatatttgtagttttgggttttttttggtaagggtagttggaatattagtaagaaaaattttaaggattgaattgattaaggggtttaagaggtgaatgttttattggttattttgttaggggtgggtgttttgtaagttttttggaaggttaagataattgtttgtgagttttttaaattttttttttatattagtattttttattttagttttattttttatataagatttttatagtttattgtttttgtaatagaagatgttttttttgtttgtttgggttttagtttttttttttgatttatttattagtttatttaaaatatttgaatattttatgggaatattattgtttttttattattttttattgaggaattttaatttggtagtttgttttaggttttgttttttttttttttttgttaattatttttttattaattaaatttttttttagtatgtttgatttaatgagtttttttggaatttttttttttttagttttgtaaaggggaggagagggagaatgtaagtgtaagaaagaaaaaaatgtgatgggggtagaatttggttttagagggaagtttttataaaaggaaaggggtaagtgtgtgtattgtttattttagtgtagtggaggtgagggtaggagagtattaggaaagatatttttatttttttagtatgtttattttttttgtttttttttttattttttttatatattataattataggtttttgttttttagataatttgattttattttttatatattttttttttttagtttttattgattatattttttagttttttgggtaaagtgtatattgtttgagttttatttttgtttatgtattttttttatatttttgatatttgtatagttttttttttgtatatttttattttgtataagttttattttttttggtatatttgtgttatttaattatttattttttatgtttatttgtttattttttatttttagatatatatttagttaatttgtgtgtatattttttttttttggttatttttttttttttattttttttgggattttatatttgtttttgtttttgggatatttgtttgtgtggggtagggtggggatgtgtagttgtggtttttttttttttttttttttttgttttgtttttttttttattttttatttgttttttggtgtttgttttgtttgtttgttattttgggggggtttttgttgttgttgttgttggaaggagttgttatttgttattgttgagtgtatgggttgagttaagtttgattttggagttggagggggattgggattgagagaatggtgatggggggtggttttgttgtaggaggatttgggtgtgtaattttgggggtttggtttgttttagatttagatttgtggggtgtggtattttgagtttttttttttgttttttgttttggttatggttgtttattttgttgtttttgggttgttagtttgtttggttttgtaagtattggagttttggtggtggtagtagtgaatggttgttgtaggttttgaagattttggtttggtttggttttttagtgtgtgttttttttttggttttgtttttttttttttttttgttgttagtgagttttttttgtatgttgttttttgtttttggtgtttggatgatgtttaagttttggttttgtatgtttttgaatg

SEQ ID NO: 681 - DNA, 6228 bp, Artificial Sequence
  chemically treated genomic DNA (Homo sapiens)
tgtttagaaatatgtggagttgagatttgagtattgtttggatattgggggtggggggtagtgtgtaaggggggtttgttagtggtggggggaggggagaggataaggttgggaagggggtgtgtgttagagagttgagttgggttggggtttttggggtttgtgatagttgtttattgttgttattgttggggttttggtgtttgtggggttgagtgggttggtggtttgggggtggtggggtgggtggttatggttagggtagggggtggggaggggggtttagggtgttgtattttgtgggtttgggtttggagtgggttgggtttttggggttatgtgtttgggtttttttgtggtggggttgttttttattgttgtttttttggttttagtttttttttggttttgggattaggtttggtttggtttgtgtgtttggtggtggtaaatggtggttttttttggtggtggtggtggtggagatttttttggagtggtgggtgggtggggtgggtgttggggagtgggtgaaggatggagggaggggtggggtggggagggggagaggagaaggggttgtggttgtgtatttttgttttgttttgtatgagtaggtgttttaggggtgggggtaagtgtgggattttgaggagggtggaggaaggggagtggttaaggaaggggagtgtgtatataagttgattaggtgtgtgtttgggagtgggggatgagtgggtgagtatggaaggtgagtggttaaatgatgtaggtgtattagggagggtgaggtttgtgtaaaatgggaatgtgtaaagaaagagttgtgtaagtgttggaggtgtgagggaggtatatgggtaggggtgggatttaagtaatatatattttatttaaagggttgaaaagtgtgattgatggggattgggaaagagaggtgtgtaaggaatggaattggattgtttgagaaatagaagtttgtgattgtaatgtgtgaaggaggtgagggagggagtaggggaggtaggtgtgttaaagggatgggagtgttttttttggtatttttttgtttttatttttattatattgaagtgaataatatatatatttatttttttttttttatggagatttttttttgaggttaagttttatttttattatattttttttttttttatatttatattttttttttttttttttttgtaaagttgagggaaaagggattttaggggagtttattgggttaaatatattgggaaaaaatttaattagtgaaagagtaattaatagaagaagggaggggatagagtttgggatagattgttaaattaaggttttttaatagaaagtgatggagagatagtaatgtttttatgaagtatttaaatgttttggatggattaatgaatgaattagaaaaaggggttgggatttaagtagatagagaggatgttttttgttgtaaagatagtaagttgtgaaggttttatgtggaaggtgaggttgaagtggggaatgttggtgtgggaagggagtttgaaaaatttatagataattattttagttttttagaaggtttataaagtatttatttttagtaaggtagttaataaaatatttattttttgagttttttagttagtttagtttttgaggttttttttattagtgttttagttgtttttgttaggaggggtttagggttataagtattaggatggaaagaggaggtatttgtattaatatgtattttattttgttttaagttatggtttatatttattttttagtttgaatttttatatttttagttagatggttaaggaaaatagaagttagagtggaaggagtggtaaatagggtaataaaatggttttagattttagataaatttttataaatgagatattaattgttttttttttttatttttatatttttaaagggttgggagataaagattttggagttaataaaataaagtaggagaaatttatttgtgtttatttaggtgtttgggtagaggttatttgggaataagtgtgttttggatagtgttaagtgttaagaaagtggtattagggaaaaagagggaagtataataattttaaatgagtagttataaggtttgtagaagggggtatgttatttttatttattgtggtggtttggagggtgtagggggtgtggtggtaatttttttgtatatgtgtaattttgtatttgttttatatatgatgtgataaataatattatatatatatatatatatatagaagtatatatgtatatatataaatattatataattatagaatttttttattggaaaaaaaaaaaaaatttaaaaggttaagtatttttgttttttgtttattaataatttttttgttagatggttttaggtttttgtattaatatttttagggaggtttggaagttggaaaagtgagaggattattttgttattgagtttgttggattattgtattaatttgttttttgttattttttaattgtagttttgtttttaaatgggtattgtttattttttattgtagaagattttattgttggttatatttttatagatagttgtattattattttaaagggttagtgatagatattaaaaataaaataaaaatttatatatatattggaagtaagtatttagtaaaatgttgtagaattaatgaatgaaataatgatataaatgagagtatgtttttttatggtggagtgaaaaggtgatagtattatttttggtattttaatttttattttttttttaatgtagataggttgaaagattggtagtgagattggagtttagtttttagattggtagtgagataattttttagttgggagttgggttttgggtggtttaggttgttatggtattgttttgggttttatttttttttgttttttttattgttttttttttgtagtgggggttgtggtagttagttatgtgtttgttgtgtagttatatttttgttttttagagtaatgttaagtggttatgtgtgatagtaatagattatgtggttgttattgtttttttgtttttttatattttttgttttttttttagttgaagtattttttgtttgttttttagtgtatgggtggtggttatgtgtttagaatgtttggtgtttgttttgtttttttagtttttgtgtgtttttttggtagttggttatatggtgagggtgggggtgagggggtttttttagtttgtggtttgtgtttatggttgggttttttgtgtttagttgttttggattgagtttgggtgtatggggttgtaggaattggttttggggttttgataatgggttgtttttatagtattttgggttggtgtgaggtaagtgtagtttttttttaggaatgagaattagtgtttgttttttttatagttttttatgtgtttgttttgtgagttggttatggaagggttgtttaagggtgggaagtggggtttttgtggttatgggaaagtataattttagggattgaggtgtaggatttttgatgtaaggtatgtgttatgtgtgatttttgtgtggggtgtgattgttttaaaggaaaaagtgttttttattgtagggttttatgtggttggaggggttggtattgagttattgtgttatttttggggttggttttaaggaagattgggagtgggggatgggatgttggtggtgttttttgtgttttttttttgggagtttttttgttgttgtaggtttatattattttaattttgtaagtgatttttggtgataggagtttgtgattgtagggttttttttgatttgagaatggttattttttgatatgagttagtggttgaaattggtgttggtgtttatgggatagtgtataaggtttgtgatttttatagtggttattttgtggtttttaagagtgtgagagtttttaatggaggaggaggtggaggaggtttttttattagtatagtttgtgaggtggttttattgaggtgattggaggtttttgagtattttaatgttgtttggtgagaaggtggtggagggttgggtgtggggagtaaagggaaaagatagtttataggtggggtgtgatgatttgtagagaagtggggattttgaggaaataatgagaggttatgttgggttaaaggggattgaaaagtgagtatttattttggttaggttgatggatgtttgtgttatattttgaattgattgggagattaaggtaattttggtgtttgagtatgtagattaggatttaaggatatatttggataaggtatttttattaggtttgttagttgaaatgattaaggtgagtggggttggtaggtattgagaggtggattgggatttttgtagtagaattttttgggattttaggtatggtgtttagtttttagtgtatttgtattttttttttgaaattaggatttgatgtgttagtttttaagaggtttagattttttttatgttaattgtattgtttattgagatttgaagttagagaatattttggtgataagtggtggaatagttaagttggttgattttggtttggttagaatttatagttattagatggtatttatatttgtggttagtagaaagatggtattaaaatgggttttggttgggagtaggagagtgattgtttgtagtaattgagaagttatgtgttttatgtgtttagttaagtaagttgtgttttatggtaatttatggggtttttatttattttttttattttttttaggttgttatattttggtattgagtttttgaagtttttttgtagtttatatatgtaatatttgtggatatgtggagtgttggttgtatttttgtagagatgttttgttgaaagtatgggatttatatattttggattattttgaattttttaaattgtttgtttataaattatatttatattttgtttattttttttttttgagattagggtttgttgtgttgtttaggttggattgtaatggtatgattatagtttattgtagttttaattttttgggtttaagtgatttttttattttagttttttaattagttgatattataggtatgtatttttatgtttggttagtttgttaatatttttatagagatggggttttagtatattgtttaggttggttttgaatttttgtatttaagtaatttttttatttttattttttaaagtagtataagttattgtatttggttttatttttttatttgtgtattattaatttgtttatagtagaaagttttgaaatgttttggaattaggaattttatatttttttattttttttattttttatttatttatttatttatttatttatttatttatttatttattgagataaggttttattttgttatttaggttggagtgtagtggtttaattatagtttattgtagtttttattttttgggttaaagtaatttttttattttagttttttgagtagttgagattataggtgtatgttattatgattggttttttttttttttagatggagttttgttttgttgttaggttggagtgtagtagtgtgatttttgtttattgtaatttttattttttagatttaagtaatttttttgatttagttttttaagtagttgggattataggtgtatgttattatgtttagttaatttttgtatttttagtaatgatagggttttattatgttggttaggatggttttgattttttgattttatgatttatttatattagatttttaaagtgttaggattataggtgtgagttgttgtatttggtatttttttttttttaaaaaaagagataaggttttgtttgtttaggttgatttagaatttttgggtttaagtagtttttttattttagtattttaaagtgttggaattgttggtttttattttttatattttttattttgagttattaagtagtaattatttaattaagatatttttgaaaatgattgttattttatatttttttttattttaggttttttttttgtggaaattttgaagttgattagttgggtaaaatttttgagtaagtgattaatatgggagaaaaagattttttattttgagttttttttttgttgaatttaggatggtaattggttttgtttatggggatgggaattggaggatttttttgattagagt

SEQ ID NO: 682 - DNA, 6139 bp, Artificial Sequence
  chemically treated genomic DNA (Homo sapiens)
ttttatttgaagttagagatttgggaaggttttttagtttagtgttttttaagaggtagaaggaagagtaggaagattgggtagaattattagaaagagggaattttggtaggaagtagaagttagggtgggttttaaggaaggtattttatagtttttgtgtaagagttttatttttagaatgtttttgttgagtaattgggtaattttattaattttatttttattttattgtttattttatatttttattttttatttttttatatttattttattttattttggtttttaattagttttattttttgatgttgtatttagtgaattatttgtagaaagatagtgttatatataaaaattgtttttagagaaggtatttggaggttttggggttggagggtttttaatataagaatagtgtttatgtgtttaggtggttttttttggggtattttttagtattatgagtttagggtagagtttggtttaggaatagtaagtaggttagttttggttatggttttgtttttttaattttaagtaaaatatttaatttgtatattttttatagtttatttatttttttaaagatttatttatatttaatttttaatgttttgtttatagttttttggattggggggtatagggtgtataagggatagaaaaatggaaagtaaggaattgtttagaaggaattggaataatgatgattttttttttttttttatgttttagagagattgggggaaaaatagttttatttagatatttagttgggattgattagggattatgtttattagtttaattttatttttttattttttattaggaaaaaggtgtttatatttatggttatagttatgtgttttatagaagggtaagtatgatatgttagattagagatttagagttttaagttagagggattttaaagaatattatgtggttaggtatggtggtttatgtttgtaattttaatattttgggaggttgaggtaggtggattatttgaggttgggagtttgagattagttttgttaatatggtaaaaattttatttttataaaaaatataaaaattagttgggtgtggtggtgtgtgtttgttattgtagttatttaggaggttgaggtaggagaattatttgaatttgggaggtagagattgtagtgagttgagattgtgttattgtattttagtttgggtgatagagtgagattatgtttaaaaaaaaaaaaaagaaaaaaagaaaaaatttatggtaggtagagtgatttatttaaggttatgtaggattgggattagaattgtgttttttggattttattttaatgtttttttttattatattaagttgttttatatatttttatttttttttttttataagtttagagtatttgagatgttgatttaggtatgaatgggttttgaagtttatagatttgtgttttaattttagttatttattgtgggtagttatttaatttttttgaattttaggtttttagtaaaatgtggatagttaaagtaattattttaaaaggttgttataagtgttatattagttaggataatatattaagtgtttagaatatagtaggaatttaataaatggtagtagttatttattttaggtggtaggatttttagatttgaaaaatagtttttgtttagtaaagttaaaagaagggaagagaagtaggtgttagtagtttttatagttttttatttttttttatttagttttaggtttttttagagtttagaaggtgatataggtggttagaggaatttagtgattagagttttggggagagtaaggtaggggggttaagttaattagaaaggggagggagaaggtgtagggtgatagttaggtttttgttatggatagggagtagtgagttaggtttgtagaggtaagaggagtagttgtgtgggtggggggtgggggtggggtgagttatagtttagttttgtttagtttaggaggagagggttaggagaatttaggttgtttaggttatgggtaattttagagggttattgggagaggatgaagtatgggagtttaggtttagttttggagtatgtgtttgatttatataaagtagagagagtatttaaggaaagtttttgggaatgagggagaagggtagttgaggagtaggtggaattagaataggtgggtatttgtttaattaaatatagttattttagggtatagtgttgagtttttgttttattttggataatttttttaggtttggaggtaggagagttggtaggttttggattttgttttgtatttgtatttggttatagttaaagaggttggttggaggattttatatagttttttttatttggagtttttttaggaatgtaaggtgtttagtaagttgtaggtttttggtagtatttatagatatttagtattttaatatagttttttaggggtttagtgtttattatttatagttttatttagggtggttaagagttttttatttttttttgtttttttaatttggagataggtggatggaggaggttaatattgtatattttttagagatgtgtttgggtatttttgtatgtgttatttttattttatatataatagttatttgatatgggaattagaattggtgtttatttttatatagtagttttagggaaagtattttaattattttttgtttttattatttagtttatttaagaagaatgtaataattttagataatatgtttgatttaatttgttttggagtatttagaagggtagtaatttagtaggtgaggtaatgataagagagagagagtgggatttatattttaggattttttagtgtttattaggttgattagtttttttttgaggttttttatgaatatttttaatttatagtattgtttaaatagtaagaattttggatttgtttattttttaatagtttattaaggtttaaggatggggggtttttatatttattttttaaaaggtttagatttgttttttgtaagttatggattttttggttttggttgttttttaggggtagtagttggtttgtggatatagtgggagggtttgggttgttggttttagtagttagttttttttgaagttgttttaggtttttgttagttattagtgttgagagaattgtgggtgagaggttaggttgtattagatatttgtttagatttttgattaatatgtattgatgttgatgtttgtttgttagagtgtaagggttttattaagtggtttgtgttgggtgtgttgtggtgatttttttttatgtttttagtataatgtttttatttttttgatttttgggggtgttggtagtttttttatttgtagttagaaagagttttagtattattgatggtagtagttttatggttttgtattgagaggaggtggtgaggtattagttatttttgaagtggtggttattgggtgttggtattagagttgggtggtggagtttaggagattttgttgggtattgtttgttgtttgtttttgtgtgtaagtttggttgggatttaggtgtagtttgttttttttgagtgttttgttttgtttatttagtttgtttgtgtggttgtttgattttgtgtgtttaggttaggttagttagtagtgtggtttgtgtagtttttttggttgaatgagtgttgtttggtttgtggttgggaataaggttttaggaggtgtggaagttttgttttgtttggtgttgttttttttttttttttgtgttgggaagtttgtttggtttgtggtgttggtagtgtagtttttgattttgtgggtgtggtggaggattgggtgggaggagagggtggtgtttataatttttgggattaggttgaggtagttgtggtttgattgtgggtagggttattgattggtaggtggtggagagtggtttttatttttttttaaatgtttgttattttgtagttttgtgattgattgttgagttgagttttgttttgggtttggttttttgttttatttaagttttatattaggggtttttatttttgttattttttaagttttagaagtttattttttggtttattaatatggtaagtattaaataataattaatttatttattatttaaaaattagatatgtgaatgttagttgtttttataaatttgagataattagagttgaagttgtaggtatttagtattaatttagtaaaagtaaaggaagttagtatttttttagtttttggagtggtttttttttatttttttttaggggatattaggatttttgaattatgggttgtaatttttaggtttttgagattggagagatataggttgtgaaataagttttatttttttttttgtttttgattgttatttttttttttaatataaaaaatgagttatttttttataggatttagttggttaatttagattgttgttttatagatattaggtgttttttttttaatttatgtgtttttgtaggggttttttggagttattgttttgatttaaagaaatgagtgttttagtaggtattttagtttttagggatgtgttggggagagagttgtttgatatagggttgggttggtttttagagttttgaaattgtgttagatagagtatttgttggattttgtttgtgtgtagggataaaaataggtttgttatttatatatagtttattttattgtttttttttatttttatttttgtaggggttagtttggttttgtttttttaatttgttttagtaatttaggtttaggtttttatagtgtattggaattattatagatttgagtttgaattttgtttttgttatttattgtgtgattttggataagaaatttaattttattgagttttagttttgatgttttttaaatggaaaaaataataataataataataatgattattttgtagggagttttttgagaaatgaatgtgggaatatataaaagtagttagtatagtgttaggtatattataagtttttaataaatgtgatttattattattgttgttgttaataataattattaagtatttgattattttatttttttagaggtttttttttttttatttttttagattgtttgtttttttttaggttatatttgaggttttatgatatagttgggttggttttagatagaagtttatttgttatttatttggttaagagttattgttagattatttttttgggtgatgagtattgggtttaggattttagtgtatggttattgtttaagttatgattttgtttttttttagtagttgtttggttatttgtttttttaaaataaagttattttggggttaaggttttttttaggggagggtggagagaaatattttttgatatatggttaaattatttttttttttttatttttgttagagttatattttgtttttttgttttagtttgtttttttttttttatatgttttgtttttttgtttttttatttttatattagttttagttttatttatggggtaattttaaatttttattatatttggagttttattttagttaggtttgtgtgttagttaggttttataggaagggtttgaaaaaagaagataaaaagtttgaattggatttgggatagttatttttttttttagaattttggatgtttttgagtaaagaaaaggaattataatttatgttgaggtaattttattaatttaattatattataaatattaattgaatatttttggggggtattggggatatagaaataaataagatagtttaggatttgtttttatagagtttatattttatagtagataggtagtatattaaggaaataaataaggaaaaatatattttatagtgataattgttaagatgaaagttaaaatataatgatgtgttgtaggataatatgttttagtgtttaggatgatattttaaattgattagtaaagttttttttgagtaggtgatatgtaagttgaggtttgaatgagaagaagaaattagatttgggattatttatgataaaagtattttaagatgtgtaaatagtgtaaagattttgaaatggaaaaaagttgg

SEQ ID NO: 683 - DNA, 6139 bp, Artificial Sequence
  chemically treated genomic DNA (Homo sapiens)
ttaatttttttttattttagagtttttgtattatttgtatattttggaatgtttttgttatagatgattttaaatttgattttttttttttatttaggttttagtttatatgttatttgtttagagaaggttttgttaattagtttaaagtgttattttgggtattggaatatattattttatagtatattattgtattttaatttttattttagtagttattattataggatatgtttttttttgtttatttttttaatgtgttgtttgtttattatagaatataagttttgtgaaagtaggttttgggttgttttatttatttttatgtttttagtgttttttaaaaatgtttagttaatgtttatgatataattgagttaatgagattgttttagtatgaattgtgattttttttttttgtttagagatatttaagattttgagaggggaagtgattgttttaaatttaatttaagttttttattttttttttttaggttttttttgtaaaatttggttgatatataaatttagttggggtgaggttttaggtgtgatgaaagtttggagttgttttatgaatgggattgaggttgatgtgggggtgagaaggtggaaggatagagtatgtgaagggagaaaggtaggttggggtaagagagtagggtgtgattttggtgagggtgggggaaagggggtgatttgattatgtgttaggaagtgtttttttttatttttttttggggagagttttgattttaaggtggttttgttttggggaagtaggtggttaggtagttgttgagggagggtaaagttatggtttgggtggtgattatgtattgaggttttaggtttgatatttattatttaaaaggataatttaatagtggtttttagttaaataggtgataggtgagtttttgtttgaaattagtttaattatattataaagttttagatatggtttaggggaaggtaagtgatttagagaagtgagagaaaagaggtttttaaggaaatagagtggttaagtgtttagtgattattattaatagtaataataataatgggttatatttattgagagtttatagtgtgtttggtattatattaattatttttatgtgtttttgtatttattttttaaaaagttttttataaagtagttattattattattgttattattttttttatttgagagatgttaaaattgaggtttagtgaaattaagttttttgtttaaggttatatagtaagtagtaaaggtaggatttaaatttaggtttgtagtgattttagtgtattatggaaatttaggtttaggttattggagtaagttaagagggtagggttagattgatttttgtaaaggtggggatagggagggatagtgggatagattgtgtataaatagtaggtttgtttttatttttatatataggtagaatttggtaagtgttttatttggtataattttagggttttgaaagttaatttagttttgtgttaaataattttttttttagtatgtttttggaaattgaaatatttattgagatatttatttttttgggttaggatagtgattttagaagatttttgtaaaagtatatgggttggaagagaaatatttagtgtttgtgaaatagtaatttaggttagttagttgggttttatgggagggtggtttattttttatgttgaggaaaaaggtggtagttaaaggtaaggaaaagaataaggtttgttttataatttgtgtttttttaattttagaagtttgggaattataatttatagtttaaaaattttaatgttttttgagggaagatgggaggaagttattttagagattaagagagtattaattttttttgtttttgttggattgatattaagtgtttgtaattttaattttggttattttgggtttatgagaatggttggtatttatgtgtttaatttttaaatgatagatgaattaattattatttgatatttgttgtgttggtaggttaaaaggtgggtttttgaaatttagagggtgatagggatggagatttttggtatggggtttagatgaagtaagaggttaggtttggaatagaatttagtttagtagttagttataaggttgtagagtgataggtgtttggggaaaggtaggaattgttttttgttatttgttggttagtagttttatttataattaggttgtggttgttttggtttggttttaaaaattgtgaatgttgttttttttttttgtttagttttttgttgtgtttgtggggttgggggttgtgttgttggtgttgtgagttgggtgagttttttagtatgggaggagggagggggtggtgttgggtggggtggagtttttgtgttttttggagttttatttttggttgtgagttgggtagtgtttatttggttgaaggagttatgtgggttatgttgttggttggtttgatttaggtgtgtggggttgggtggttgtgtgggtgggttgagtgagtaagataagatatttaagaagagtgagttgtgtttgggttttggttaggtttgtatgtagaggtgggtggtagatggtgtttggtggaattttttgagttttgttgtttagttttggtgttagtgtttagtggttgttgttttgaaagtgattggtgttttgttgtttttttttggtgtgggattatgaagttgttgttgttggtggtgttgaagttttttttggttgtaggtaagagggttgttgatgtttttggagattggggggatgggggtgttgtgttgggggtatgggggaaggttgttgtagtgtatttggtatgggttatttggtggggtttttgtgttttggtggatgggtgttggtattggtgtgtgttggttaggggtttgggtgggtgtttgatgtggtttggttttttgtttgtagtttttttggtattggtgattggtgagagtttggagtggttttggagagggttagttgttggaattagtaatttggatttttttattgtatttatggattagttgttatttttaggaggtggttgggattggaaagtttgtgatttgtaagaggtagatttggattttttgagaggtgggtgtggaggttttttatttttggattttggtgggttgttgaagaataagtagatttaagatttttgttgtttgggtaatattgtgggttgagggtatttatggagaattttggggaaaagttgattggtttgatgggtattgggggattttggaatataggttttatttttttttttttgttattgttttatttgttgggttgttgtttttttgggtattttggggtaaattgaattagatgtgttgtttggggttgttatgttttttttaggtaagttgggtgataggaataaggaatggttgagatgttttttttagagttattatgtaaaaatgggtgttagttttaatttttatattaaatgattattatatataaaatagaggtaatatatgtggagatgtttaggtatatttttagaaagtgtgtagtgttggttttttttatttatttgtttttagattggggaaatagaggggaatgaggagtttttggttgttttagatgaggttgtgaatggtgagtattgagtttttagggggttgtattaaaatgttggatatttgtgaatgttattggaaatttgtagtttattgagtattttgtatttttgaggagattttaaatggggagggttgtgtaggattttttaattagtttttttggttgtggttaagtataggtatagggtagagtttagagtttgttagtttttttgtttttaaatttgaggagattatttagagtagagtaaggatttagtattgtattttggaatgattatatttggttggatagatgtttatttgttttagttttatttgttttttagttgttttttttttttatttttaggagttttttttggatattttttttattttgtataaattaagtatatattttaaaattgagtttgggtttttatattttatttttttttagtggttttttggggttgtttatgatttgaatagtttggatttttttggttttttttttttaggttgggtagggttgggttgtgatttattttatttttattttttatttatatggttgttttttttatttttgtagatttgatttattgttttttgtttatggtaggagtttggttgttattttgtatttttttttttttttttttgattggtttggtttttttgttttgttttttttgaagttttggttattgggtttttttgattatttgtattattttttgagttttgagggggtttgggattggatgagaggaaatgaaagattgtgggggttgttggtatttattttttttttttttttttggttttgttgggtaaggattattttttaggtttggggattttattatttaaaataaatgattgttattatttattaaatttttattgtgttttaggtatttgatatgttattttggttaatgtaatatttatagtaattttttgagatagttattttggttatttatattttattgagaatttgaggtttagaggagttaagtgattgtttatagtaaatagttgaaattggagtataggtttatggattttagagtttatttatgtttggattagtattttaggtgttttagatttgtgagagggaggagatgggagtgtgtgaggtagtttggtgtggtgaggaaggatattggagtgaagtttagagaatatagttttaattttaattttgtatgattttgagtaagttattttgtttgttatgagtttttttttttttttttttttttttttttaaatatagttttattttgttatttaggttggagtgtaatggtatgattttagtttattgtaatttttgttttttaggtttaagtgatttttttgttttagttttttgagtagttgtgataataggtatatattattatgtttggttaatttttgtattttttgtagagatgagatttttgttatgttggtaaggttggttttgaatttttgattttaggtgatttatttgttttagttttttaaagtgttgggattataggtgtgagttattgtgtttggttatatggtattttttgaagtttttttagtttgagattttaagtttttagtttaatgtattatgtttatttttttgtaagatatatggttgtagttatggatgtgggtattttttttttgatgggggataaaagggtgggattgggttgataggtatagtttttggttaattttagttggatatttgggtgaggttgttttttttttagtttttttgaagtatggaaagaaggagggagttattattgttttagttttttttggatagttttttattttttatttttttattttttgtatattttgtattttttaatttagagagttataaataggatattgggggttaaatatgaatgaatttttgagaaagtgggtgagttgtaaagggtatgtaagttaaatattttgtttgaagttgaaaaagtaaggttgtgattagggttggtttgtttgttgtttttgagttaggttttgttttgggtttatagtattaaggggtgttttagaagagattatttgaatatatggatattgtttttatattaggagttttttaattttagaatttttaagtattttttttagaagtaatttttgtgtgtgatattgtttttttgtaagtggtttattgagtatagtattaggaaatgaggttgattgaaggttaaaatagaatgaagtgggtgtgggggagtaggagatgggggtgtaaggtggatagtggggtggaggtgaggttggtagaattgtttagttatttaataaaagtattttgagaatgaggtttttatatagagattgtgaaatgttttttttgggatttattttagtttttattttttattgaggttttttttttttggtggttttgtttaatttttttgtttttttttttgttttttaggaggtattgagttaaggggtttttttagatttttgattttaggtggaa

SEQ ID NO: 684 - DNA, 6237 bp, Artificial Sequence
  chemically treated genomic DNA (Homo sapiens)
tttgttatagagtttatatttaaagaatttaatttgtgatagtattaaattaaaagagatttaggaggttgaggtaggattgtttgaatttgggaggtggagattgtagtgagttaagattgtgttattgtatgttagtttgggtgatgagagagaaattttgttttaaaaaaaaaaaaaaaaaaagagagaaaatatattaggtaggggtattttataaaggagagaggatatataataaagtgtttatatatatatgggaagtaaaatagtattgattttggggttagattatttgggtttgaattttgttttttagttttgtgttttagtttttttatttggaaaatggggataataagagtatttatagggttgtaatgaggaagaaatgagataatgtggataaagtagttttatagtgtttattatatgttaattattgttttaagtggttatttaataaatagttgtgaggttaaatttataggttttgaggggtagttgggttgggattttttttagattttgggtatgggtataggtatagtgtaggttagggtatgttgaagtatgtatgtttatagaaataggtttgagtagggttagtatgggtgatgttataggtgtgtgtttgtgtgggtgttgggttgttttttttagatagtgtagttgtatgtattgttatttatatttatgtatttatatatatgttgagttgggggaagtttatatagattatattttttgtatgttttgttttttttgtattttttttggtggaaggaggtatttgaggtttgggatgttggtttagaagttttaggaggaaatgggttttgttttttgattataggtttggtaatgggttgaaaatttaagtttttgttggtagggattttttgagtttttagaggtttagatttagaggtaaaagtaaaagtaaggaagttttattttgtatgttaggaagtttttaaaaaaatggagaaatggatgtaaaaagtgtattagagtttataggttgttggagttagtatagtaagtttaatgagggttgtagtatttaagagggtgttttttgtataaaataggattagatagttagagaggggttttatttagtttttgtttgtttttttggttttattattttttgttttttttttagttaggaaattttagttttgtaattttaaatttaataatttttttttggttttagggtttttgtatatgttgttatttttatttggaatgtatttttttttaatttatttttaataatttattttgttattgatttattttttttagatttttgttgaggtttgaagagattttgatttaatgtttttttttttagtttttattataattgtttttatgtaatagagtgtttatttaatgtttgaatttttagagagttggtgttgtgttttttttgtgttttttatgttgttaatgtttaatatagagaagagtagggtttatagaattttaagtttaagttagtttaagttatattttgtgagtatttatgttttgttggattttttgtgtttaaggttagtggtgagtatgtttttttttatttatgttgattaattagatagtttttatgtttattgattattgattattaggatttatttaagttagtggattttttgtgaggtagaaaatttatggagttaggttgatttgggttttagtttttatttagttatgttatgtggttttggggtaaattgtagaatttttttgaatttttgtttttttattagtaaattgtggattattatttttgattagaagataattatgaggattaggtgtgattataggtgtatatttttagtatagggtttatgttagttttgttttgtttatgtaaagatttgttattaggtggtagtttattttagttattttattgttttttattttatagaggttggttaggataaagggttttaatgttatgttgaattttgagttttttaggggatgtatttgaggaaattaatgttaatatataagtttttattatagtaagataaagttagaagtagtagttttaggttattatttagttgagtgggttgtttgagtatatgtttttataaattttagtttagttttattattttataatttttaggaagtttggttttttttttggtattagttggaagttttgttgggttttttatttttgaaatgtagtaagttgttttgttgtgtttggtagttgatttattgtttggtttaatatgttagataggttttattgtgattgtgggtgtttttaattttggtggtgttgataagggtagatagattgtaggggtgagttttaagaatggttttagaaagataaagagtatgaattatattttataattagaaaaaggttttgtggttggagaatggagagtgaaggattatttgtgagagatgaaattggtgagatgggtaggttatatagaatttgttaggttaagtagggagtgtggattttaggtgtaatgggaatttatggagggttttagtttggatgtaggggattatgatttaattttattttaaagatttaaagtatgataaatttaggtaaaattaaattgatagatttaggtaaaattaaataaggtgagtagtttgggtgataggagatggggtttttagtttgtgggttgagtgataaggttttgatggattggaggtgaggtaaagggaggaattaaagttagttgtaaggtttttgattttttaatttagagaagtttagtgttgtgttttgagaaagtgaagattgtggaaggaattgtttggggagggaaggtgagttgtttaagggggggggatgtggaatatgtagtgggatgttggggtttggaatgtaggggagatgtaggtttggagttattggtgtttgtgttgttgggtaaagttaggggaaaggttaggttgttttgggatttggtttagtattgagtgtagaggaagagaagtttttgagattgagaggtagtggttataggaggaggaagaaagtaaggtggggaaaattaaagtttaggagagtatttgtaggagggtgttgtggggtagggtttgagttggagttttgaattggatttgagttttgttgtgtggggatggagtgtgtagaggtttatgtgagggatagatataaaggttttgggagttgtaggttagattattggatagtgtggttgtggatttaatgtttttgtaaggggtgtttatgtttggggggaattttttgaaagagaggattattgaaagttattttggtagtaggggtggaatagatagatgtgggtttggttgttgttagaattgtttgtggattagttttgtgttgttgggggggtgggatatgttggttgtttattagtgtttgtgattaatttgtaggtagttttgtttttgttttttttgggagagggtgtgtggaggatttgttgttgttggtgtgaggtggtttgttttggtttttttgtttgggaagtttgtttaggtaattgagtttggttgggtatttttggaggatgtgttatttttttatgttttgttttggttgttgtatgggtggtgtttgggatgtgggggttgtgtttgtgtgggattgtggggtagtggttgtttgtgtgagtatgtttgattgatgtgttggttgttgggtttgtggtttgtgggtggggttgttgtgtgtgatagggttgtttgtggttgttgggttgtgtttggggttgtgtgagaaagttttgtgggattgagggttgggtgggttgattgggaatggtgtgtgtttttgttgttattgtgtttttgtttttgtttgtggtttgtttgggggttgtggggtgtaggtgtggtgggttgatgggtgggggttttttttatgggtgtgtgggtgtttttgtttttggtgttgaagtggggtggggttttagggtagttttgttttgttgtgttgaggttttgttttgtgtttgtttgtaggagttgttgttgggttttgtttgtttgttgttttagttttagttttaattttagttgttgttgttgtgtttgtttttgggtggttttggtttgtgttgttgttgtttttagtgttggagttatggtgggtgttgtgtttttttgtgttaatggttgtgggtttggtgtgtttttggatgttgaggtgttgtatttttgttgtagttttgaggtgggtattgttatgattttgttttattttaagaagttgtagtgatttgagtggaagattttttaggttaagttggagatgtgttagattatgtggagttggggtgttgataagattgagggggttagtaagtgtgtttattttttgtttgggtttgttttgtgtgggggttgtgggagtttggtttgattgtttgtattttggttggttgttttagtgatttgggtaaatttttgggtttttttagattttttttgggttttgtttttgttttgttttgggtggttattgggggtggggggtatttgggtttttggttatttgataggatatttttttttttttagttggggggagtgttttaggtgttttgttttgaggtttaaaaatttttgtgggttggagatttgtggtgtaggtattgggttttttagattttgggagtggtggtggtgttggtgaggggagttaaggtagtggtttttattttgtatgggaatttggggtttgattagatggtttttgtttattttttatttagaaagagtagtttgtgaaattttttgggtttttaggttgggtttttatttgtaaaggaatttttgggttttttaagtagaatttaggtagatgttgggtagggttggttttggagtagagttgggtttatttatttttttttgggggagagggaggaaggtggttttgtttggtttggagaagtttgagagaagttagtggttggaatttttttttttttttttttgttatttttgttttaaagttgggttttggaggtttatgtgggtgggtagatatttaatgttagggtagggattttttttgttttgggaagtatgtttttaggagatgggttttataaaggtttgttttagtgttttggagttaggtattttttttaggagtgtagttagtttgtgagtttagttttttgttttttgtttggtggttttagggagtgggagtggttttttttagttttttgtttttttgtttttttaggtttgagtttggttgtttttgtgttggtttttagtgggaggagggagttgggggattttgaaaaattttagatttttgagagttgttttatttagtgtgtgtttgtgttgtggttggatgggtattttgttttgttttttatttttttgttttttagtgtgaagagatggtgtgtttgtaattttagattgggttgttttttgtagggatttttggagattagggttagagagatttaggtttagaattaggtttgtgtgaaggagggagattaggaagtgatattttaagggggggttttataaatttttttgggtatggtgtgtatgtgtgtagatagttgaggagattgggaggaaggaaggttttgtggtgaggtagttaattatttttagttataaattttagatttgatatagatttaatgtagttgtttaatttagaaatggtagtttttttttttagtgtttttattgattttgttagttattgggagaatattttagtgatttgagagtttgtggattttaaagtaaaggaagaattgatattgtaaagagttgagataattttgggaatattatttaggtattaggttttaggtatggtttttttttttattttttatgttgtgttgagttggtggtattggttggaagtttttagagattttttgggtaatagattgtattttaaattatgtatattagtaggtaataaatgtagtatagtggttgatggtaagtttggatttgaagtttatatatttattgtgtgttttttggttagttatttattttttttgagttttgatttttttatgtgtaaaatgggggtaataatatatttagtatatatggttgttttaggattaaatgagataatttatataaaatatttagtattgtttgatatataaatgtttaataaatatgagttgttattagtaataatattaataatagatt

SEQ ID NO: 685 - DNA, 6237 bp, Artificial Sequence
  chemically treated genomic DNA (Homo sapiens)
ggtttattgttaatgttattgttaataatagtttatatttattaaatatttatgtgttagataatgttagatgttttatatgaattgttttatttgattttggagtaattatatatattggatatattattatttttattttatatatgaggaaattaaggtttagagaaggtaagtaattggttgggaaatatataatgaatatatgggttttaaatttagatttgttattaattattgtgttatatttattgtttgttaatatgtgtggtttaaaatgtagtttgttatttaggagatttttgagaatttttagttagtgttattaatttaatatagtatagggagtaaggaaggggattatgtttggagtttgatgtttgagtgatgtttttagggttattttagttttttgtagtgttgattttttttttattttggaatttataggtttttaagttattaaaatgtttttttaatggttgatagggttagtgggggtattgaggaagggggttgttatttttaagttgagtagttgtattagatttgtgttagatttggagtttgtagttgaggatggttggttgttttattataagattttttttttttttaatttttttaattatttatatatatgtatattatatttaagaaggtttgtgggatttttttttggggtgttattttttgattttttttttttatatagatttggttttgagtttgggtttttttaattttagtttttgggggtttttgtaagaagtaatttagtttagagttgtagatatattatttttttatattgagaggtgggggaatggagggtagagtagagtgtttatttgattatagtataggtatgtgttaagtggaataatttttaaagatttggggttttttaaaattttttaattttttttttttattagagattagtgtaaaagtagttaagtttaggtttgggaaggtgaaaaggtaggaaattaagagaagttgtttttgttttttgaagttattggatagaggataaagggttagatttataaattagttgtatttttgagaagaatatttgattttaaggtgttggggtaggtttttatggggtttattttttgggaatgtgttttttagggtaaggggagtttttgttttggtattgagtgtttgtttatttatataggtttttaaaatttagttttgggataaaagtagtagaaaaaaaaaaaaaaaaattttagttattggttttttttaggtttttttaaattaaataagattattttttttttttttttttagagggagatgagtaggtttagttttgttttaagattagttttatttaatatttgtttaagttttatttagggaatttaaagatttttttgtaaataagagtttagtttgggggtttggagagttttatagattgttttttttggataaagagtgggtggggattgtttggttaggttttaggtttttgtgtagggtgggggttattgttttagttttttttgttgatgttgttattatttttagggtttggggggtttgatgtttgtattgtaggtttttagtttgtgaggatttttaggttttagggtaaagtgtttggaatattttttttagttgggggagggggggtgttttgttaggtgattgaggatttggatgttttttgtttttagtgattatttgagatgaagtgggggtggggtttggagggagtttgggagggtttgaaagtttgtttaagttgttggggtggttggttggggtgtaagtagttgggttgggtttttatgatttttgtgtggggtgggtttaggtaggaagtgggtgtatttattggtttttttgattttgttggtgttttggttttatgtgatttggtgtgtttttagtttgatttggaaggttttttgtttgggttgttgtgattttttggagtagaataaagttatgatggtgtttattttgaggttgtggtagaggtgtagtattttggtgtttgagggtgtgttgggtttgtagttgttggtgtaaggggatgtggtgtttgttatggttttgatgttgggggtggtggtggtataggttaggattgtttgggagtaagtgtaatggtggtggttgaggttggggttgaggttgaggtggtagatgagtgggatttggtggtggtttttgtaggtggatatggggtggggttttagtgtggtggggtggggttgttttgaggttttattttgttttggtgttgggaataaaggtgtttgtgtatttgtggggaggatttttgtttgttggtttgttgtgtttgtgttttgtgatttttagataggttgtaggtggggatggaggtgtgatggtggtgggagtgtgtgttgtttttggttgatttatttagtttttagttttgtagagtttttttatgtggttttggatatagtttggtggttatgagtggttttgttatgtatggtagttttgtttataggttgtaggtttggtggttggtgtgttagttaggtgtatttgtatgggtggttgttattttgtggttttgtatagatgtagtttttgtgttttgaatattgtttatgtagtgattgggatgggatgtgaggggatggtgtgttttttgggaatgtttggttaaatttagttatttgggtgggttttttggataagggagttaggatgggttgttttatattggtggtggtgggttttttgtgtgtttttttttgggaggggtgggggtggggttgtttgtggattggttgtgggtattgatggatagttgatatgttttgtttttttggtagtgtggggttggtttgtaggtagttttggtgatggttagatttatgtttgtttgttttgtttttgttgttagggtggtttttagtggtttttttttttggagagttttttttaagtgtgagtattttttataggggtgttaggtttgtggttgtgttgtttagtggtttgatttgtagtttttagggtttttgtgtttgttttttgtatgggtttttgtatgttttgtttttatgtgataggatttgagtttgatttggggttttgatttagattttattttgtagtgtttttttgtaaatgtttttttgaattttggttttttttgttttgttttttttttttttttgtagttgttgttttttgattttagaagtttttttttttttgtatttagtgttaggttagattttaaggtgatttgattttttttttggttttgtttaataatataggtattggtgattttaaatttgtattttttttatgttttaggttttagtattttattgtatgttttatattttttttttttagatagtttgttttttttttttaaatgattttttttatagtttttatttttttagaatgtggtgttaaatttttttaagttggaaggttaaaaattttgtagttaattttgatttttttttttgttttatttttaatttattaagattttgttatttagtttataagttgaaggttttattttttgttatttagattatttattttgtttggttttgtttggatttattagtttggttttgtttggatttattatgttttaaatttttaaaatgaaattaaattatgattttttatatttaggttaaaattttttgtgaatttttattgtatttaaaatttatattttttgtttggtttagtaggttttatatgatttgtttattttattagttttattttttataagtgattttttattttttattttttagttataaggtttttttttggttatggaatataatttatattttttgtttttttgaagttatttttgaaatttatttttgtaatttatttatttttgttagtattgttaaaattgaggatatttatggttgtggtggagtttgtttgatatgttgagttaggtagtgggttggttgttaggtatagtaggataatttattgtattttagaggtgagaagtttaatagagtttttagttgatgttagagaaagagttaggttttttgggaattgtgagatagtaggattagattagagtttgtaagagtgtgtgtttaggtaatttatttagttggatagtgatttggggttgttgtttttgattttgttttgttgtagtggaaatttgtgtgttaatgttgatttttttaagtgtgttttttaagaagtttagaatttagtatgatattgagattttttgttttagttagtttttgtggagtaaggagtggtggggtagttgagatggattgttatttagtggtaggtttttatgtgggtgggatggagttagtgtagattttgtgttgaaggtgtgtatttgtggttatatttgatttttataattattttttaattaggaatgatggtttataatttattgatgaggaaatagagatttagagaagttttataatttgttttaaagttatataatatgattaggtgggaattagaatttaagttggtttgattttatgagttttttgttttataggagatttattggtttaggtaagttttggtggttagtagttagtgggtatggaggttatttggttaattagtatgggtgaggggaggtatgtttattgttggttttgggtatagggaatttagtagaatgtgagtgtttatagagtgtggtttgaattggtttaggtttgaagttttgtggattttgtttttttttgtgttgggtattgataatatgaggagtataagagagatatagtgttagttttttgggagtttagatattaaataaatattttgttatataaagataattatgatgagggttagaaggaaaaatattgggttgagatttttttagattttagtagaggtttaaaggaagtgagttgatggtgaggtgaattattaaaggtgggttggagaaaagtatattttaagtagaggtaatagtatgtataaaggttttgaggttaggaagaggttgttgaatttagggttataaagttagagttttttgattgaggaggggatagggagtgatgagattaggaaggtagatgggggttgaatggggtttttttttggttgtttgattttgttttgtataggaggtatttttttaagtgttgtagtttttattgagtttattgtgttgattttggtagtttgtgggttttgatgtattttttatatttgtttttttatttttttgggagttttttaatatgtagggtaaggtttttttgtttttatttttgtttttgggtttggatttttaggggtttaagaaatttttgttaataagagtttgagtttttagtttgttgttaggtttgtaattagggaataggatttatttttttttgggatttttgggttagtattttaggttttaggtgtttttttttattaaaggaggtgtaggaaaaatagggtatgtagagggtgtggtttgtgtgggttttttttagtttagtatatatatgggtgtgtgggtgtgaatggtaatatgtgtagttgtgttgtttgggaggagtagtttagtatttatataagtatatgtttgtgatgttatttatgttagttttgtttaggtttatttttgtgaatatgtatgttttagtatgttttggtttatattgtatttgtgtttatgtttagagtttggggagagttttagtttaattgttttttgggatttgtgggtttggttttatagttgtttattaaatgattatttagaatagtggttgatatatagtaaatattatggaattgttttatttatattgttttattttttttttattatagttttataagtgtttttattatttttattttttagatgaaaaaattgaggtatagagttaaaaggtaggatttaaatttaggtagtttggttttagagttagtgttgttttgttttttatgtatgtatgaatattttattgtatatttttttttttttgtaaaatatttttatttgatatgttttttttttttttttttttttttttttgagatagagttttttttttgttgtttaggttggtgtgtaatggtataattttggtttattgtaatttttgttttttgagtttaagtagttttgttttagttttttgagttttttttgatttggtgttgttataggttgggttttttggatgtggattttgtgatagg

SEQ ID NO: 686 - DNA, 6200 bp, Artificial Sequence
  chemically treated genomic DNA (Homo sapiens)
taggtgatttttttattttagttttttaaagtgttgggattaaaggtgtgagttattattatatttggtttttaatttattttttaatgtttattattttattttgatattaaaaattatgtatgtttaatatgaataaggatatatttttatatatatatgtatatatttatatttatgtttttatattaaaaagtatgggggaaagaaatggggagatgtaggttaaagaatataaagtagtagatatgtaggatgaagaagtttagagatttaatgtataatatgaagattatagttaataatattgtattttatttgtgttttttgttaaataagtagattttagttgtttgttatattttatataagtttttatgtgatggtatagatatgttaatttattttattatagtaattattttattatttatatatattttataatattatgttataaattttaaatatatataataaaatttatttttatttatttaatttatttatttatttttgagatggagttttgttttgttgtttaggttggagtgtagtggtgtgattttggtttattgtaagttttattttttgggtttatattatttttttgttttagttttttgagtagttgggattataggtatttattattatgtttggttaattttttgtattttttagtagagatggggttttattgtgttagttaggatggttttgattttttgattttgtgatttgtttattttagttttttaaagtgttgggattataggtatgagttattgtgtttggtttattttatttatttttgagatagagttttgttttgttgtttaggttggagtgtagtggtgtaattttggtttattgtaaattttgtttttttggtttaggtaattattttgttttagttttttgagtagttgggattataggtgtttattattatgtttggttaatttttgtaatttagtagagatggggttttattatgttggttaggttgattttgaagttttgattttaagtgattttttagttttggttttataaagtgttgggattataggtggtagttgttattgtatttatttagaataatttattttttaaaaaattatgagtttaggttgggtgtagtggtttatgtttgtaaatttagtattttgggaggttgaggtgggtggattatttgaggttaggagtttgagattagtttggttaatatggtgaaattttgtttttattaaaaatataaaattagttaggtatggtggtgtatgtttgtaattttagttatttgggaggttgaggtaggagaattatttgagtttgggaggtggaggttgtaatgagttaaggttgtgttattgtatttaagtttgggtaaaaagagtaaaatgttatttaaaaataaaaataaaataaaataaaaatatttttttaaaaaataaaataaaataatgagtttatattgatatttttaattttaatataatagtgtaaggtattttttttttttatatttttaatgttattttattatagtgagaaagttggttttgttatgtttaatatatttagtgatttaattaattattttgaatgtaattaattttttatttaagtttttaggttttttttatttggatgttttgttttttttttttgggttttatggttaagattttgtgtaggattgttttttaggtgtttaagttttttttatttttttaggttttttagtttttttatttgttaggttattaatatttggttgtggataattaggtgtagatgttttttttgttttgtatatgttttttttgttttgtatatttaatgtttttgatatttagtattttaggatgggaaaggggaagaggaatattgaatgtgtatttttaaatgggtattgtgttttttattaagttttttatttatattttatttttttagtaatttatagaattggaatttttggattaaagttttttttttttttgagatggggttttattttgttgtttaggttggagtgtagtggtgtgattttggattattgtaatttttgttttttgagtttaagtaattttttgttttagttttttaagtagttgggattataggtatttgttattatgtttagttaattttttgtatttttagtagagatgggttttattattttggttaggttggttttgaatttttgattttgtgatttatttgttttggttttttaaagttttggaattataggtgtgagttattgtgtttggtttggatgaaagtttttttaaagggagttttgttttgtagttttggttggtgtgtagtggtgtgattatagtttattgtagttttaaatttttgggtttaagtgattttttagttttagtttttttagtagtttggatgatagttgtatataattatgtttagttaatagagatgggggatttattatgttgtttaggttagttttgaatttttgggtttaagtgatttttttgtttgggttttttaaaattgggattataggtgtgagttattgtttttggtttgaaagagtgtttttaaggttttaaaaaaatattgttaatatggtgaaaatttgtttttataaaaatataaaaaggatttgggtatgatggtgagtgtttgtaattttagttatttaggagattgaggtaggagaattgtttgaatgtgggaggtagaggtggtagttagtggagattgtgttattatattttaggttgggtaattgagggagatattgttttaaaaaaaaaaaagtttttaagtttaaaaaaaaaaaaattattaatttgtttttaaaaattgttgtaataatttataattttattagtattgagtatttatttttttgtattttttttagtagtattattattaaataaataaaatttatatgtgttagtttgttgggtttaaaggagttttttgataagttttttattttttatgttgttttttttttggatataggaaggggtttttttttttatttattttgttattttatttttgttaatatggtttggtttggggataggggttgggggtaggttggttattgtagaggtggaggttgtgtggtatttggtttggagagtttattatatagtgatatagatttttttttagttgggtttatttgtttgttttggggtgatagagggtgttatggtgtttgtgatggattttgtttttaggtagtgtgttgtgtttttgtgatgtatttttgtgttatttgttgttgaggtttgtttttattggttgtttgtgaggtaataggggtggagttgagtgggagtgtggaaagtgttgtattttgggtgggaggtgaggtttttttttttttgttttttttttggtttttagttttttttagggttgttttgtagagtggttaggagtatggtggtggtggtattttttttggtaggagttggagttgggttttggtgtgtgtgtggttgtgttgtttgagttggagggattggttggttgagagagagagaggaagggaattttgggttgttgaattgtatgtttagtttgttttgtttttgtagggtagttttttggttttttgtgtgtgaagttgagttttgggtgggtggggtgggggtttattgagattgttattggttttttggtgttgatgggattgtgtggggtgtatttgttgaaggtagttttggggtttgtggtttggatttggttttgtgtagtgggtgtggggtagtgtagtgggaggaagtgagaggtgttgttttttttttggagttggaagtgtgttatttgggtttaaaatgtttaagaagaagttgatgtttatttagttgaatttggtttttgatggttttgtagttaatgggattagttttgtggagtaagtatggggtgggtggtgaattttggggtttggttggggaggtttgagttggggagtaggagtgtgtgttaggttttgatttggtttgttatgtatgtttggggttggtagggggtgagaaatttttggttgttgaggtattggtgattaagtattgattgtgtttttgatttagattagttagtggattttgtgggtttttatttttttttgtatttttttttttgattgttttagtggtttttggttattgtatagtttttttttaagaaaataaaagttagtatgttttttttgtttttttttagttttgttttaaatgtgattatttgggagtttggtttgtaatggggagaggaggttaatgttttggaaagaattaagattgtatttgtgtttttgagattagtttagggtattaagtgtggagtattatttttatttttatgtttgatatttgtggggtttgagtgttttgttgtaggttaattgtttggttagtgggggtgtgttggaagtttgtgtggattttgtggtttttttttgttgattttggaggtttttggtatttggtttttttgggaaattgtttaagaaagtggtttttttttttattttattttttatttatttattgaataaattatttttttattaatgattttttagttttttgtattttattaggagtttttaaatttttgatttgaggtatgaatattatgatttagaaattatatgttaggtgttttatttttgtagtttttagtgttgtttataaatgagtattttattttattaaataattatgagtttgttttttgggggtttttgagtttttataatttttttgggttttaggtaagggataagattatgtgagggaaagttgtttagttagttagagaaatagttagaaaagattaggttattattatttttttgtttttttttggttgttgtttgtttaatttttaataaggattgggtttttaattttttatttgtatattgtagattttaggaagttaattgatgaaattagaataggtttggattttatgttttttggtgatttttgtaatttttttttttttttttagatttttagaaaattttattttttaaatttttatatagatggggttttgttatattgtttaggttggttttgaatttttggattttagtgatttttttaaagtgttgggattataggtatgagttattatgtttagttaattttttttagattttaataatttggggatttgttggtttgatgatttgttttatttttgtaatgattataaggttgatggtggatttgtggtgtgtgtttagttgtgttttttagatttgtttttaatagatttttttttttagtttttttttaattttgtggggtttattttgtataatattgatttgtataggtagttggattgtattattgtattgtaaatatttgttttttttttttttttttttttgagttggagttttatttttgttgtttaggttggagtgtaatggtgtgattttggttaattgtagtttttgttttttgggtttaagtgatttttttgttttagttttttgagtagttgggattataggtatgtgttattatgtttggttaattttgtatttttagtagagatggggtttttttaagttgtttaggttggtggtaaatttttgtttttaggtgatttatttgttttggtttttgaaaatgttgggattataggtatgagttattgtgtttagtttatttgtttagttttagtatatagtgttttatttttttaaaatagattgaaagttatgattgttgttaggataagttttgattatagtggattttggttgagtgttatggttttattatttttttttatttgatttggaagtggatattgagtagaagtatttgttattattttgttgtaattgtgatattataattgtatttttttaaggaggaggaattttattaaaatagtaaaagtaggatgagaagaaattattttagatttggtggtagaaaaatttggatggtattgggagagtttaaatagtggttaaaaggtaagggttttggagttaggttaagtttgaagtttagttttgttgtggttttttttttttttttttttttttgatagttttgttttgttgtttaggttagagtgtagtggtgtgattttggtttattataatttttattttttggttttaagtgatttttttgttttagttt

SEQ ID NO: 687 - DNA, 6200 bp, Artificial Sequence
  chemically treated genomic DNA (Homo sapiens)
aggttgaggtaggagaattgtttgaagttgggaggtggaggttgtggtgagttgagattgtattattgtattttggtttgggtaatagagtgagattgttaaaaaaaaaaaaaaaaaaaaaaaattataatagagttaggttttaaatttagtttgattttagagtttttattttttaattattgtttagatttttttagtattatttaaatttttttgttattaaatttggggtagtttttttttattttgtttttattgttttaatgaaattttttttttttgagagaatatagttgtggtattatgattataatagaatgataataggtatttttatttagtatttatttttaaattaaataggaaaggataatgaggttataatatttagttagaatttattgtggttaaaatttgttttaataatagttatgatttttagtttattttaagagggtgaaatattgtatattaaaattgaataaatgggttgggtatggtggtttatgtttgtaattttagtatttttggaggttgaggtaggtggattatttgaggatgggagtttgttattagtttgaataatttggagaaattttatttttattaaaaatataaaattagttgggtatggtggtgtatgtttgtaattttagttatttgggaggttgaggtaggagagttgtttgaatttgggaggtagaggttgtagttagttaagattgtattattgtattttagtttgggtaataagagtgaaattttgatttaaaaaaaaaaaaaaaaaaagaataaatgtttgtaatgtaataatgtaatttaattatttatataagttagtattatgtaaaatagattttataggattgagaggggattaaagaagagagtttgttgggagtaggtttgaaaaatatagttgaatatatattataggtttattattgattttgtgattattatagggatggaataagttattaagttaataggtttttgggttattaaaatttagagaaagttggttgggtatagtggtttatgtttgtaattttagtattttgggaggattgttagagtttaggagtttaagattagtttaagtaatatagtaagattttatttgtataaaagtttaaaaaataaaattttttaaaaatttagagaaaggaagggaggttatagaaattattaaagagtataaggtttaagtttattttgattttattaattagttttttaaagtttgtagtgtgtaggtaaaagattaagaatttaatttttattgaaggttgggtaaataataattaaaaaaaggtaaaaaaataataataatttaattttttttggttatttttttagttagttaagtagtttttttttatatagttttgttttttatttagaatttaagagagttgtgggagtttagaaatttttaggaaatagatttatgattatttaatgaaataaagtgtttgtttgtaagtaatgttggaagttgtagagatggagtatttagtatgtggtttttaggttatggtgtttatgttttaggttaggagtttaggggtttttggtgaagtatggaaagttaggaaattattagtgagaaaatggtttgtttaatgaatgaatgaagagtaggatgaagaagaaagttgtttttttgagtaattttttaggaaggttaagtattaggaatttttaaagttagtaaggaaaagttatgaagtttatatggatttttagtatgtttttgttggttaggtagttggtttgtaataaggtatttaggttttataggtgttaggtatgaaggtgaggatgatgttttatatttaatattttgagttggttttaaaagtatagatgtgattttaattttttttaaaatattagttttttttttttgttataggttagatttttagatgattatatttagaatagaattgggaggaggtaggggagatgtgttagtttttatttttttgggagaagattgtatagtggttaggaattattaaaatggttgggaaaaggggtatagagaggaatggagatttgtgggatttgttaattggtttgagttaggaatataattagtgtttagttattgatattttggtggttgggagttttttgttttttgttagttttagatgtatgtgataaattagattggagtttggtgtgtgtttttgttttttggtttgggtttttttagttgggttttgaggtttattgtttgttttatatttattttgtagagttggttttgttaattgtagagttgttgggggttgggtttagttggatgggtgttggtttttttttgggtattttggatttgggtaatgtgtttttaattttggggggagggtagtattttttgtttttttttgttgtgttgttttgtgtttgttgtgtaggattaagtttgggttgtgggttttggggttgtttttagtgggtgtgttttgtgtggttttgttagtgttgaggggttggtagtggttttagtggatttttgttttatttgtttgggatttggttttgtgtgtagagagttgaaaggttgttttgtaggagtggagtgggttgaatgtgtggtttggtagtttgggatttttttttttttttttttttaattaattagtttttttggtttgggtggtatagttgtgtgtgtattagagtttagttttagtttttgttggggaaagtgttgttgttgttgtgtttttagttgttttgtgaagtggttttgggagggattggaggttgggggaggggtggggaaggggaagttttgttttttatttgggatgtggtgttttttatatttttatttggttttgtttttattgttttgtagataattaatgggggtaagttttggtggtagatgatgtggaaatatgttatgggagtgtggtgtattgtttgggggtggggtttgttgtggatgttgtggtgttttttgttgttttgaggtaagtaggtggatttagttgagaagaagtttgtgttgttgtgtggtgagttttttaggttaggtgttgtgtggtttttatttttgtggtaattggtttgtttttgatttttgtttttaagttgagttgtgttgatgaaaatgaaataataaaataaataaggaaaaggatttttttttgtgtttagaggagaggtagtgtggggaataggaaatttgttgagaggtttttttgagtttaataaattgatgtatataaattttgtttgtttaatggtaatattattgagaagggtgtaaggaaatggatatttagtgttgatgagattgtaaattgttgtgatagtttttgagagtagattgatgatttttttttttttagatttgggaatttttttttttttaagatggtgttttttttagttgtttagtttggagtgtagtggtgtgatttttgttaattattatttttgttttttatgtttaagtgatttttttgttttagttttttgagtagttgggattataggtatttgttgttatgtttggattttttttgtatttttgtagaaatgggtttttattatgttggtaatatttttttaaagttttaaaaatatttttttgggttaggagtggtggtttatgtttgtaattttaattttgggaggtttaggtaagaggattatttgagtttaggagtttgagattagtttgggtaatatagtgagttttttgtttttattagttgggtatggttgtgtgtagttgttgtttaagttattgaggaggttgaggttggaggattatttgagtttaggagtttgaggttgtagtgagttatgattatattattgtatattagttagggttatagagtaagattttttttaaaaaaatttttatttaggttaggtgtggtggtttatgtttgtaattttagaattttgggaggttgagatgggtggattatgaggttaggagtttaagattagtttggttaagatggtgaaatttatttttattaaaaatataaaaaattagttgggtgtggtggtgggtgtttgtaattttaattatttggggggttgaggtagagaattgtttgaatttgggaggtggaggttgtagtgatttaagattatattattgtattttagtttgggtgatagagtgagattttgttttaaaaaaaaaaagaattttaatttaaaaattttaattttgtgaattattaaagaaataagatgtgaataaagagtttaataagaggtataatatttatttaaaagtgtatatttagtgttttttttttttttttttattttaaaatattaagtgttaaagatattaggtgtatagaataaaggaaatgtgtatagaataaaggaaatatttatatttggttatttatagttaggtgttggtgatttagtaggtaaggaggttgaggaatttgagaaaatgaagagggtttgaatatttgggaggtagttttatataaagttttagttgtagggtttaagaggggagaataaggtatttaagtggggaaggtttagaagtttagatgggaggttagttgtatttaggatggttgattaagttattaaatatattaagtatgatagagttagtttttttattgtggtagaatgatgttagaagtatgggaagggagaatattttatgttattgtattggaattggaggtattagtgtgaatttattgttttgttttgttttttgggggggtgtttttgttttgttttgtttttgtttttgagtggtgttttgttttttttgtttaggtttgagtgtaatggtgtaattttggtttattgtaatttttattttttaagtttaagtgatttttttgttttagttttttaagtagttgggattataggtatgtattattatgtttggttaattttgtatttttagtagagataggattttattatgttggttaggttggttttaaatttttgattttaggtgatttgtttattttggttttttaaagtgttgggtttataggtgtgagttattgtgtttggtttgaatttatagttttttaaaaaataaattattttgggtggatgtagtggtggttattatttgtaattttagtattttgtgaggttaaagttggaagattatttgaggttaggattttaagattagtttggttaatatggtgaaattttgtttttattaaattataaaaattagttaggtatggtggtgggtatttgtaattttagttatttaggaggttgaggtaggataattgtttgaattagggaggtagagtttgtagtgagttgagattgtattattgtattttagtttgggtaatagagtaagattttgttttaaaaataaataaaataggttgggtgtggtggtttatgtttgtaattttagtattttgggaggttgaggtgggtagattatgaggttaggaaattgagattattttggttaatatggtgaaattttatttttattaaaaaatataaaaaattagttgggtgtggtggtgggtgtttgtagttttagttatttaggaggttgaggtaggagaatggtgtgaatttgggaggtggagtttgtagtgagttgagattgtgttattgtattttagtttgggtgatagaataagattttgttttaaaaataaataaataaattaaataaataaaaataaattttattgtgtatatttgaggtttgtaatatgatgttatgggatatatatagatagtaaaatggttattatagtgaagtgaattaatatatttatattgttatataaaggtttgtgtaaagtatgatgagtagttaaaatttatttatttaataaaaaatgtaaataaaatataatgttattaattatggtttttatgttgtatattagatttttagatttttttattttatatatttgttgttttatattttttgatttatatttttttattttttttttttatattttttaatatagaggtatagatgtaaatgtatgtatgtgtgtgtagaagtgtgtttttatttatgttaaatatgtataatttttagtattagagtaaaataataaatattaaaaagtgaattgaaggttaggtgtggtggtggtttatatttttaattttagtattttgggaggttgaggtgggaggattatttg

SEQ ID NO: 688 - DNA, 6198 bp, Artificial Sequence
  chemically treated genomic DNA (Homo sapiens)
gtttttaggtttaatggaaaagttatttattttttatatgttgttatagtaatagtaataagaagtattatttatttttataagaaaagttttttttgtaggggatattgagtatttatagaaagattattttattttgaggaatttaaaatttggaaaagtaaatatggaaaatttagtttttaaggtttttatatatagttttatagtttatgttttaagtgaatattttttaattatggttgtttaatatggaaaatatgtgttttaggaaaatttttattgtttattttgaaagatattatgtttaggtaatagagaaaagaaatgtttttttttagtttttgtattggttttttagttttgatttaaatagggaaggtgatttattttgtttttgtttatttttaatgttattttattttttatgatattattttttaggtttatatttggtttttatttatgggagttgttataaaaataataaagtttatttttggattataaaatttatttttgtattataagattagttgtattttgtgtgtagtttttatttttttttataaatagtttttatatttattattttatttgagttttataatagtttgtgaggtgggtatagttttattatttttattttatagatgataaaattggaatttagtgttaatttttataaataattgattgttgaatattaaaggagatataaaaaatttgtataaaaaattaaataattaaataattaaaattaaaaaagattaaattaaaaagaattaaagaatttatgatgtttaaaagaatttttagggttgggtatggtggtttatgtttgtaattttagttttttgggaggttgaggtgggtggattatgtggttaggagatgtagattattttggttaatatggtgaaattttgtttttattaaaaatatatttaaaaaattagttgggtgtggtggtgggtgtttgtagttttagttaattgggaggttgaggtagaatggtgtgaatttgggaggtggagtttgtagtgagttgagattgtgttattgtattttagtttgggagatagagtgagattttgttttaaaaaataaaaaattaaaaaaataaaagaaaataaaataaaaaaattttttagatttgtttgaatttgttattggttaaattatatttattagaaattatttaggtaggtttttaggttgggtgatattttttgaaggaatggtaaagagtatggagatgagataaatgaaaatttataaatttttttagttatataatttatataatttgtaatgatgtttggaattttatggggtttaaagtaataataataatgatgatgatgataagattaagattttattatatattaggtatttttttgtatatattaaatatatttaataattttattaatatttttattttgtaggtgagaaaaataaggtatagaaaagttaagtaatttgtttaagattatatattttgttttgtgaatatagaggaggaaatgtaattggaaatgttaagtttttgtgtggtttgtttgttagtgatggaaatttgatatgggagggtagttattataggaatttgggttatgtttttagtgttgttatttgggtaatagtttttatatttttttattgaaaatattaattaatgtttaggttttaagtaattaaatattaattgagatttttaatagttagtttttttttagattagttttatggaggttttttagattttgggtagtgatggaatattggttgatttttttggaattgtttttaattatttaagaaaaattagaggggaaagtagttttgaaggaaatgtgtaaagtaaagttatatgtgggaggtagtagttttagtaaatgtatagaatttatagttgtgattttttttttaaagatatataaataaaaaggagtttttattggtgtaaattatttttgttttttttttttttttattttttttaattgtttatattttggaattgtgtgagtaagtttttatatattgattaattttttaaagtttatatattatttttttaaagaaggaaataaagattaagttgaaaagaatatttaggtaaaagagaaaaattatatgatgaatgaatgtagtttttgtgggtgagaattttgggatgggagtgtggggtgtagggatagtttttaaatatttatttaaatgtgtttatttttattattttttgtttttaatttttattgaataattattttgagattttaggaatttaataggaaatttaatttaataataagttttagggtattttatataatttttttttaaggtaaagttttaaaagagagatgggattataatgattataagttaggtgattttttatatttatattttttttatgttttttgataattttggtttagttatttattgtggattttgtgtgttttatttttttttgttatataatgagaataatattaatattttttttatttggttggtgtgaaaattgtatgaataaatgtaaagtatttggattgtgtttgatatagagtaaaatgtttgaatagtattagttgttattattattattatttattattattatttgtaaaaatattataagggataattatatttaggaagttttttttgtattggtaatgttttattgttttttttaaaatttaaattagagtaatagttaatatatgtatataaaaaaggtaattttttaaaaatgtgggggaaaagttttttatatttatgttatttgttggtgagttttaggtaagggtgtagttgggagtatttggttttaagattgttttgtattttttttataggatgtttttttttttgttgtggtttttaattagtgtttttagggtaggtttgtaggtggggttgtgaattttttgtagttgtatatggagttgggtgaggttgtggttttgggtatttttggggaggagttttatggttttttatagattttaattattttgtagtgagttgtatgttatatgggttaaatttggggtatattgaatgaataatttattttatggaagattagtaataattaggatatttgtgttattgattagttattttaatattagagagatttattagtataaggggtaagaattggttaggaggtgtgtggtgttgtgtttttattgtgtttagatagatttttgaattttattgttaaaaaatgtattgttttgtagatttgatttgggagaggggtttaatttttttttattttttttattttttttttatttttaaggatatatttaaaggaaattggtaatatttggtttagggttttgtttttgtttttggtggatattgaaattattttttttagggaagttaattaaaggaattattaatttgtttaaaaatttaaaatttatttttaaagtttaagagttttgaaaagagattgagggtgtttttgttgattttgaatatttttgtttgttgttggggtttagaggtgggtagggggtgttaaaggggtgtaggtaagatttggttagagggttagatgttggtttttgttttgaggtggtttagtttatatgttagtgatgttggttgagttgggtttggaggtagttaggtaagtaggtaggtgtaggtatgtgtttgagtagatatatagttgtggtggattaaagtttaagtttgtttatattttgttttttttttttaggtgtttttatgtatggtttaggtagttatttttttggggaagttttggtgtttgattggatagttttttttttgttatttttaatgattttttttgttttttaggtgttaatttattgagattatttgtttttttttatttttttaggtgggtgtagaaatttttggaaaggggaatttggtggggattgggggaagtagggtgttgtgtggtgtagggggtgttgtagttggtgtatgtatttagagtgaatagggtgagttgtttagttgaggggattattttatgggtgggtgggtagtaggttttttagttttttgttttatttgtggtgtttgagtggtggagtggtgttgtggtgtgggggaaaaagatgtagattaggtagggtttgtttttggtgtgggagggtggagggaggattgagtgtttttttgttggtatttgttttgtagtgttgtttgttgggtggaaataggaaggtggttattgttatttttttgttatttggtgattggggtatagttgattttttttttttgttttgatgggggtgtttttttgagggtatagagggtgggggtttggggtaaggggtggggatgttgagtgtattgagtagggtgtgggttgttgggtggggtgatttgggattttagagtttggtggtgtgagttgggtatttgggttgatgaaaaggtaggaagtgtttgattttagatattatttttgattgttagtgttgtgtggtagtggattttagtgtgtggggttggtgttggttgtgtagttggattgttttgggttgtagtggtggtttttaggttttaggtggtggagtggagttgtttgggtatttgttatttatattgaggggttgtttttggggtatttttggggtggggaaggttggaggttggggatgtagttaggaaagggatttgtgagttttgttggttgtttgttaagatttggtttaaggaaagtggttttttgaattaatgaagaatttgttaaattaggttttttatttgtgttatagtttttattaattttggtaatgtttgttgttttattttttaggtaggttatattgttaagattagtttttgtatttttggtttgggattgataaaaaatgggtttttgtgatgaatttggttatatggtattattagttgaggttaaaagtttgttagtttgttattaagtgtattttgaaagaggggtgtgtgggtttgagttatttgggtggtttttttaggatttgtggttttgaggtggtttttggtgttggaatttggggaggtggaggggatagagggaagatattttgggtgaagagtggaagatttataggttttttggtgatttttatggggatagtatatttgggagatttatgttttttaggtatttggagtttatggattgattttttttttttgttttttttggtttatgtgttttgggtagatttattttttttgaaggtgggggtgggggttgttgggtttggggaattttttgttgtttatttggggaggtttaggtttttatggttgatttttgtttagtttgttttatgtaagtagagtaatttagttttaagaaggaagtattaggttattggttttaatatttgggtaggaagtattagtgtaaattattttttttaatagatttgttggagtatattttgtttttttagggtaaattttttttttggtttattttatgtatgtataaggtatatatgtattttttttagtaggttgtttttgatttttattttttttaggttgattttgatttgttttggtggtttttttgttttttttttaaattagtttgttttggttatagaaggggaggaattaggggtttttttattttttttttgttttttaggattagagaaggatttgattttttgttttttattggaatatgtaaattaagtttattgtggttgagggatggttgtttagttggttgagggttatgtttagtagtttttgtttatttgttttttatttttaaagttagaggtggagggaagtagtagaattaagttaattttttttatgattggaaaatattttaaattaagaggtaatttgtaggttaggtatggtggtttatatttgtaatattattattttgggaggttgaggtgggtggattgtttgagtttaggagtttgagattagtttgggtaatatggtaaaattttttatttttattaaatatataaaaaattagttagatatggtggtgtgtgtttgtagttttagttatttgggaggttgaggtatgagaattatttgaatttgggaggtagaggttgtagtgagttaagattgtgttattgtattttagtttggatgatagaataagattttgttttaaaaaaaaaaaaaaaagaaaaa

SEQ ID NO: 689 - DNA, 6198 bp, Artificial Sequence
  chemically treated genomic DNA (Homo sapiens)
ttttttttttttttttttttttgagatagagttttgttttgttatttaggttggagtgtagtggtataattttggtttattgtaatttttgttttttaggtttaagtgatttttgtgttttagttttttaagtagttgggattatagatgtatgttattatgtttggttaattttttgtatgtttagtagaaatggggggttttattatgttgtttaggttggttttgaatttttgagtttaagtaatttatttattttagttttttaaagtgatggtattataggtgtgagttattatgtttggtttgtaagttattttttgatttaaaatattttttaattatgaaggaaattgatttgattttgttatttttttttatttttgattttgggggtaggggatagataagtagaaattgttgaatatgatttttagttggttgggtagttattttttagttatagtgagtttgatttgtgtgttttagtaggaagtaaggagttaggtttttttttagttttggggaataggagaagggtgggggaatttttgatttttttttttttgtagttaaagtagattagtttagggaggagatagggaaattattagagtaggttaagattaatttgaaggaagtgggagttagggataatttattaaaggaagtgtatgtgtgttttgtatatgtatggggtggattaaggaaaagatttattttaaaagaataaagtatgttttgataaatttattgaaaggaatgatttatattggtgttttttgtttaaatgttgagattaatggtttggtgttttttttttgaaattaggttgttttatttatatgaaataaattgggtagaggttaattgtgagagtttgagtttttttaagtaaatagtaaaagattttttaggtttaatagtttttatttttatttttaaggaaagtggatttatttggagtatgtaggttagaggaggtaggagaagagggttagtttgtgagttttgggtatttggagaatatgaattttttgggtgtattgtttttatgagggttattgaggaatttatggattttttattttttgtttagaatgttttttttttattttttttatttttttaaattttagtattaggggttattttagagttataaattttgaaaggattatttaggtgatttgggtttatatattttttttttggggtatatttggtggtaggttagtaggtttttggttttagttggtggtgttatataattagatttgttatagagatttattttttattagttttaggttagaagtatgaagattgattttaatgatgtggtttgtttgggaggtaaggtggtaggtgttgttagaattgatgggaattgtggtataggtgggaaatttggtttaataaattttttattgatttaggggattattttttttgagttaagttttggtaagtggttggtgaaatttataggttttttttttggttgtgtttttagtttttagttttttttgttttagagatgttttaggagtggttttttggtgtaggtaatgggtgtttgggtggttttgttttgttgtttagagtttggaagttgttattgtggtttaggataatttggttatgtggttggtgttgattttgtatgttggagtttgttgttgtatggtgttggtagttgggggtggtgtttgaagttaggtgttttttgtttttttgttggtttgggtgtttggtttgtgttgttaggttttgggattttaggttgttttgtttagtagtttgtgttttgtttggtgtgtttagtgtttttgttttttattttaaatttttattttttgtgtttttaggggggtatttttattggggtgggaggggggggttagttgtgttttggttgttgagtggtgaggaggtgatggtagttgtttttttatttttgtttggtgggtagtgttgtggggtgagtgttagtagagaggtgtttggttttttttttgtttttttgtgttgggggtaggttttgtttagtttgtgttttttttttttgtattgtggtgttgttttgttatttgggtattgtaggtagggtaggaggttggagagtttgttgtttgtttgtttgtaaaatggtttttttggttggatagtttgttttgtttgttttgggtatgtatgttggttgtggtgttttttgtgttgtgtgatattttgttttttttggtttttgttgagtttttttttttgggggtttttgtgtttgtttgggagagtggagagaagtgagtagttttaatgggttggtgtttgggaggtaaggggagttattaagaatgataaagaggggattgtttggttgagtgttgaggtttttttgggaaagtggttgtttgggttgtgtgtgagaatatttgggaaggggaagtggagtgtgaatgggtttgaattttaatttgttgtagttgtgtgtttgtttagatatatgtttatatttatttgtttatttggttgtttttaagtttggtttagttggtgttgttggtgtgtagattgggttgttttggaatgggggttggtgtttaattttttggttgggttttgtttgtgtttttttggtattttttgtttatttttaagttttagtgatgagtagagatgtttaagattggtagaggtgtttttgatttttttttagagtttttgagttttgggggtaggttttggatttttgggtggattaatggtttttttaattaatttttttgggagaagtggttttggtgtttgttgagggtaggagtgaaattttagattgagtgttgttagttttttttgagtatgtttttggaaatgaaggagggatgggaaaggtgaggggaagttaaattttttttttgggttgggtttgtggagtggtgtgttttttggtggtgaagtttaagggtttgtttggatgtggtgagggtgtagtgttgtgtgttttttggttaatttttgttttttgtgttggtgggtttttttggtgttgagatagttgattaatagtgtaggtgttttggttattgttagttttttgtgaagtgaattgtttgtttgatatgttttgagtttaatttgtatagtatgtggtttgttgtagggtggttagagtttgtggaaagttatggaatttttttttagaaatgtttagagttgtagttttatttagttttgtgtataattatagggggtttgtggttttgtttgtaagtttgttttagaaatgttgattaaaaattgtagtagaaggggaggtattttgtaagagaaatataaggtagttttggaattggatgtttttagttatatttttatttgaaatttattagtaggtaatatgggtatgggaggttttttttttatatttttgaagaattgttttttttgtgtgtatgtattgattgttgttttgatttaaattttagaaaaagtaataaaatattattaatataagggaagttttttggatataattattttttgtaatgtttttgtaaataatagtagtaagtagtagtagtaataatagttgatgttatttgagtattttattttgtgttagatatagtttaagtgttttatatttatttatgtagtttttatattaattggataaagaaggtgttaatattatttttattatatagtagaggaaagtaaagtatatagggtttatagtaagtaattggattaggattgttgaagaatgtggaaggaatgtgaatatgaaaagttatttaatttgtggttattatagttttattttttttttgggattttgttttaaagagagattatgtggaatattttggaatttgttgttaaattgagttttttattgaatttttgggattttaaggtggttatttggtaaaaattagaggtaggaaatgatgaagataagtatatttgagtaagtgtttgaaagttgtttttatattttatatttttattttagaatttttgtttataaagattgtatttatttattatgtaattttttttttttgtttgaatgttttttttagtttgatttttgtttttttttttaagaaaatgatgtataaattttaaaagattgattaatatgtaaaaatttgtttatatagttttaaaatgtgagtagttgaaaaaagtggagaaaaaaaaaaggtaggagtaatttatattagtgaggatttttttttatttatatgtttttaaaagaaaaattatagttgtgagttttgtgtgtttattagaattgttgttttttatatatagttttattttgtatattttttttaaagttgtttttttttttgattttttttaaatagttgaaggtagttttaggagaattaattagtgttttattgttatttgagatttaggaaatttttgtggggttagtttgagaaggaattggttgttaggagttttggttaatgtttgattatttggaatttgagtattgattaatgtttttagtaagagaatgtgaagattgttgtttaaatggtaatattggaaatataatttaggtttttgtggtggttgtttttttatgttaggtttttattattggtaggtagattgtatgggggtttggtatttttagttatatttttttttttgtgtttatggagtaagatgtgtgattttgggtaagttatttagtttttttatgttttgttttttttatttgtaaaatggggatattaatagggttgttgaatatatttaatgtatgtagaagggtgtttggtatgtagtaagattttaattttattattattattattgttgttgttattttgggttttatagaattttagatattattgtaggttatgtgagttgtataattgggagagtttgtaggtttttgtttattttatttttatgttttttattatttttttgaaaaatattatttaatttaaaaatttatttaggtaatttttggtgaatatgatttggttaatgataaatttaagtaaatttggagggtttttttgttttgtttttttttgtttttttggttttttgttttttgagatggagttttgttttgttttttaggttggagtgtagtggtgtgattttggtttattgtaagttttgttttttgggtttatgttattttgttttagttttttgattagttgggattataggtgtttgttattatgtttggttaattttttaaatatatttttagtagagatggggttttattgtgttagttaggatggtttgtattttttgattgtgtgatttatttattttagttttttaaagggttgggattataggtgtgagttattgtgtttggttttggaggtttttttagatattatgaattttttaattttttttaatttaattttttttaattttaattatttaattatttaattttttatgtaaattttttgtattttttttagtatttaatgattagttgtttatggaagttagtattaagttttagttttgttatttgtaaagtgggaataataaaattgtgtttattttataggttgttgtaagatttaaatgagatggtaaatatggaagttatttataaaaaaaaataaggattgtatataaaatgtaattgattttatgatataaaaatggattttataatttagagataagttttattatttttatggtaatttttgtaagtaaggattgaatgtggatttaaagaatgatgttataggaaatgaagtagtattaaggatgggtagaggtgaaatagattattttttttgtttaagttaggattgagggattagtatgggaattgaaagaagatgttttttttttttattatttggatgtgatgttttttagagtagatagtggaggtttttttaggatatatgttttttgtattgggtagttataattagggagtgtttatttagaatatgggttgtaaagttgtatatggaagttttagaggttgagttttttatatttgtttttttagattttgggttttttaggataaagtgatttttttataaatatttaatgttttttgtaaaggggattttttttataggaataagtgatgttttttgttattgttattgtggtaatatatgaaaaatagatgatttttttattaggtttaaggat

SEQ ID NO: 690 - DNA, 6222 bp, Artificial Sequence
  chemically treated genomic DNA (Homo sapiens)
tttgggaagttgaggtaggagaattatttgaatttaggaggtggaggttgtagtgagttgagattgtattattgtattttagtttgggtaataagagtaaaattgtattttaaaaaaaaaaaataaataaaaaagtaatatagttatgattattgtttatggttatgattattgtgtttattttggaatggtagagtttagtgtttggaaggaagattatttggtttataaagttttaaatattgtgtattgtttggttttttaagtttgttaatttttgggttggtggtgggtgataatgtaaaaattaatataatggtagaagaatgaatgaattttgaagaatattttttggaagtttataagaatggagtagaagaggatggatgagtagaaaggtttatatttggaatgttagtgtttatttaatatattaaggtaaatatatattatatataaaaattgttttataatatagttagtgggggaatataaaaataaatgtataattttttaaaaggtttattttaatgtggttttaaaattattttgtgtatttaagagtttatatggtatgttttggaaaatgttaggttatggtagttataaattgtttaggaatatgggagtgtatgtgtatgtttgtgtatgtgtggatttttggaattataaaatttgtttgggagaattgtgttttattgagttgatttttgtagtttttttaatattgttttgtttgattaatagatttttttttatattttgataggaggagtttattttaagattttattaggttttagtttgttttttgttttttttgaatattgtttggttttaggtttttagggatggtagttattattttggttttgaagagtggggatatttggaggtagttttggttatggtggtggatgaagaggaggtagatgggattaaggatttagaggtatatggggggtatttagatttttgttgtttttaggaagtataggtttagtaggttggtggtggtaggtttaggttttgtttggttttagatttgagggaatataaagaggatttttaggatggtataaggtaggggtttttagtttatttgtttagggggttaggtaattttttggatttttaatatttatataaaaatgtattaagtattttttggaatatttattaatttttaattttttttattttgatattaattttaggtagttgtaattatattgatttgtagatgaagaagttgaggattagagaggttgagtaattttgttgattttatttagttgaggagtggaagggttgggatttgaatttagggaattgggttatgtggtttaggagatttgggttttataattattgttaggtatggattgttagttaatttttataataattttaggatgtagatagtattgtttttattttagaaattagtagattgaggtattagttggggaattgttttttttagggatatataaatgggaagtggtaaagttgattttgatttaggtttatttgattttaaattttgtttgattggtggttttgatgtatgatttgtttttattttttattattaattaatttatgttttagagatagggttttattttgttgtttaggttgaagtggtataattaaagtttaataaagttttgaattttttgggtttaagtaatttttttattttggttttttagagtgttgggattataggtataagtagttttattaggtttggttaattttttttttttatgttttgtagagatgggggtttttttatgttggttttgaatttttggttttaagtaatttttttgttttagttttttaggtattgggattataggtaagagttattggtttagtttgatttgttatttttattttagtaggtttgttggttttatttaattttagaagaaatttgaagtttagtggatgtggtttttttaattttttttttgttgtttttttattttttttggttttataatttattggttgtgtaaattttaatttttttgtattttagtttttttttttgtaaaagggggaaaatgagattttatttttatgagttgtattaaatggattaatagtagtaaagtttatagtagtatggtataaggttgggtataaggttaggtatagagaaagtttttagtttattgttagtttattgttttaattttttggtttttgaaatgttggtagtttgtaatttttatttttattttatgaattttattttttggagttttttgttaagagtaatggaaaaagaaattagagaggtaagggttttttgggggtaggagggtttgggggatttattagttttatgtaaagaagagttaaagtttttagtagttgggaggtttggtggttttttaaatagagttgggtttttggttgttggtttggtgaaagaaatttaatttgttgtagtgagggggttggagtaagtttttttgttttttgggtttaggaatttgggggttttttttttttttagtattgtagtttgagagatttgtagttaaattaagtttggaaaaggagagtggggtgtgatggggggtatttattttttgttttgtgtagggtttagtaggtgtggttattggtgttttttgttgttgtgggttttagtgtttgtttgttgttaagtttttgggtagattgtttggttgtgattttgttggagaagaggtggggttgggttggttgggttgggttggtttggttgggatttgagttttgggattgggaggttttgggtaaggtttagttgtgtggtgggagtgaggttatgggaggtgaaaataggtgaggtgggggatgggggaagagaggtgtttggggagttgggatgggtattgggttggggggttttggaatttttgaaagtttagtgatatttttatagtttttttttttttttgtaataagaattattttagattttttaaatattttggatttagtaatttttaggagtttattttgatgagagaattgaaaggtgtgtatatgttagtaataaggaggtttggtgattgtttaagtgtttaattgtggggattattgggttgaggttgagaggatggagattgtgttataggtattttgttgttggaatggagggtggtggggagaatttagaagattatgtaatgggttggtagggttatatttagttgttttggtaagtagaaatttaagaaatttttagggttttgttttttggttgtatgattttaggagtgtatatgggttttttgggtgtttgaatagaagggtataggagggagggttgtagttttgtagttttattttgttggtgtagtggttatttgttaatttttattttattttgtattgtgggtttttgagttggtagattaagtattttataaattttattttaaatatgtgttttaaatttgttagatatttgtttttattttagtttttgtgtttttattttttgttgtggttgtttatttaatattggggggttatgttttgttaagttttagggagagattgtttttaatatttgagggagatattatttttaatattatgttgggtgaatattatgtgtgtatagtttttgatatgattggtaatatttaagggagatattattttaatattttagtgggtgaatattatgtgtgtaaatgttgtggtattattagaaatatttaagggagatattatttttaatattatagtgggtgtatattttgtgatattatttgtaatatttgaaggagattttatttttaatattatagtgggagtatatattgtgatattatttgtaatatttgagggagattttatttttaatattatagtaggtgtataatttgtgatattatttataatatgttagagatatattattttaaattttatggtgggtgtatattttgttatagaatttgtgatattttagggagttattattgttaatattatagtgagagtatattttgtgatattatttatattattttagaaagatattatttttaatattatagagggtgtatattttgtgatattatttataatattttatgaagatataatttttgatataattgtaggtgtatattttgtgatattatttgttatattttagggagatattatatttaatattatagtgggtgtatattttgtgatatgatttgtaatattttagggagatataatttttaatattatagagggagtatattttgtaatattatttataatattttagaaagataatatttttaatattatagtgggtgtatattttgtgataatatttgtaattttttagggagatattatttttaatattattttgagtgtatattgtgtgatattatttgtaatattgtagggagttattgtttttaattttatagtgggtgtatattttatgatattatttataatattttaagaaggtagtatttttaaaattatagtgtttgtatatattgtgatattatttataatattttagggagatgttatttttaattttatagtgggtgtatattttgtgatattatttgtaatgttttagaaagatattttttttaatattatagtgggtgtatattttgtgatatgatttgaaatattttagggtgatattatttttaatattttagtgaatttatattatgtgtgtatatgttgtgattttttagaaagatatgatttttaatattatagtgggggtatattttgtgttattatttgtaatattttatggatattataatattataatgaatgtatattattgtgtatatgttgtgatattatttgtaatatttttgggtgatattatttttaatgttatagtgtgtgtatattttttgatattatttgtaatattttgtggagatattgtttttaatattatagtgggtgtatattttttgatattatttgtaatattttggaagatattatttatattgttatggtgggtgtatattttgtgatattatttgttatattttggggatatattattatttttaatatattgtgggtgtattttttgtgatattatttattatattttggagatataatattatttttaatattatagtgggtgtatattttgtgatattatttattatattttgaagagatattattttttttaatattatagtgtatgtatattttgtgatattatttgttatattttggggagatattattatattatttttagtattatagtggttgtatgttttgtgatattatttattatattttggggagatattattatttttaatattatagtaagtgtatattttgtgatattatttataatattttgggagatattatttatattgttatagtgggtgtatattttgtaatattatttgtaatattttggggagatattattatttttaatagtatagtgggtgtatattttgtgatattattggttatattttggggaggtattattatttttaatattatagtgggtgaatattttgtaatattatttattatattttggggagatattaatttttttaatattatagtgggtgtatattttgtgatattatttattatattttgggaagatattaatttttttaatattatagtgggtgtatattttgtaatattatttattatattttgggaagatattattttttttaatattatagtgggtgtatattttgtgatattatttgttgtattttggggagatattattatgttttatattataatgggtgaatattttgtgatagtatttgttatatttggggaagatgttattatttttaatattatagtggtgtatattttgtgatattatttattatgtagtggggagatagtattatttataatattatagtggatgtatattttgttatattatttgttatatttttgagaaatattattattttttttattatagtgggtgtatattttgtgatattatttgttatattttagggagatattgttatttataatattatagtggatgtatattttgttatattatttgttatatttttgagagatgttattatttttaatattatagtgggtgtatattttgtgatattatttattaaattttttggagatattattatttataatattatagtg

SEQ ID NO: 691 - DNA, 6222 bp, Artificial Sequence
  chemically treated genomic DNA (Homo sapiens)
tattgtgatattatgggtaataatatttttagaaaatttgatgaataatattatagggtatatatttattgtgatattaggggtagtaatattttttaaggatataatgaataatatgatagggtgtatatttattgtgatattatgggtaataatatttttttaggatgtaatgaataatattatagggtgtatatttattgtgataagaggaataataatattttttaaggatataataaataatatgatagggtgtatatttattgtgatattatgggtaatattatttttttattatataatgaataatattatagagtgtatattattgtgatattaggggtaataatattttttttaaatataatgaatattattatagggtgtttatttattgtgatatgagatataataatatttttttaggatataataaataatattatagggtgtatatttattgtgatattagaggaaataatatttttttaggatataatgaataatattatagggtgtatatttattgtgatattagagggattaatatttttttaggatataatgaataatattatagggtgtatatttattgtgatattagaggaattaatatttttttaaaatataatgaataatattatagaatgtttatttattgtgatattaggaataataatatttttttaggatataattaataatattatagggtgtatatttattgtgttattaggagtaataatatttttttaggatattataaataatattataggatgtatatttattgtgataatatgggtaatattttttaggatattatgaataatattatagggtatatatttattgtgatattaggagtaataatatttttttaggatataatgaatagtattataaggtgtatagttattgtgatattaggagtaatatagtagtatttttttaggatataataaataatattataaggtgtatatgtattgtgatattaaaggaaataatatttttttaggatataatgaataatattataaagtatatatttattgtgatattaggggtaatattatatttttaagatatagtgaataatattatagggggtatatttatagtatattaggggtaatagtatatttttagaatataatgaataatattatagggtgtatatttattgtgataatatggataatattttttaggatgttatgaatagtattaaagagtatatatttattgtgatattaggggtaatatttttatagaatattataaataatattaaaagatgtatatgtattgtgatattaggggtaatattatttaaaaatattataaataatattatagtatgtatataatggtgtatgtttattgtgatattatgatatttatagggtattataaataatagtatagggtgtatttttattgtgatattaggagttatatttttttgggaggttatagtgtgtatatgtatggtgtaaatttattgggatattaggagtaatattgttttagaatattttgaattatattatagggtgtatatttattgtgatattaaaaggaatatttttttagaatattataaatagtattataaggtgtatatttattatgagattaggagtaatatttttttagaatattatgaataatattatagtgtgtataggtattgtgattttaggagtattatttttttaagatattatgaataatattatagggtatatatttattgtgaaattaaaagtaatagttttttatgatattatgaataatattatgtagtgtatatttaaggtgatattaggagtagtatttttttaggaaattatgaatattattatagagtgtatatttattgtgatattgaaagtattatttttttaggatattatgaataatattatagggtgtattttttttgtgatattaggagttatatttttttaggatattataaattatattatagggtgtatatttattgtggtattaggtgtagtatttttttaggatataataaataatattatagggtatatatttatggttatattaggagttatatttttatagaatattatgaataatattatagggtgtatattttttgtgatattaaaagtaatatttttttaggatagtatgaataatattatagggtgtatttttattgtgatattagtggtaataattttttaggatattatgaattttatgatagagtgtatatttattatgagatttggagtaatatatttttagtatattatgaataatattataggttgtatatttattgtgatattaggagtaaaattttttttggatattataaataatattatagtgtgtatttttattgtgatattaggagtaaaattttttttagatattatgaataatattataggatgtatatttattgtgatattaggagtaatattttttttggatatttttaataatattatagtgtttatatatatggtgtttatttattgggatgttaggataatattttttttggatattattaattgtattagaggttgtatatatgtggtgtttatttagtgtgatattaggaataatattttttttggatattaggaatagtttttttttgggatttagtagaatgtagttttttagtgttaaataagtgattatagtaagaggtagaggtgtagggattgaaatgaagataaatatttgataagtttaaaatatgtatttaaaatagaatttataaaatgtttaatttgttgatttaggagtttgtggtgtagggtggggtgggagttggtaggtgattgttatattagtagagtaagattgtagggttgtggtttttttttttatgtttttttgtttagatatttgaggggtttatgtgtatttttgggattatatgattagaaaataggattttagaggttttttgagtttttgtttattagggtggttgggtatagttttgttagtttattgtataattttttaagttttttttattattttttattttagtagtgaggtgtttgtgatgtggtttttatttttttggttttgatttggtggtttttgtgattggatgtttaggtggttattaggtttttttgttattaatgtgtgtatattttttagtttttttattaggatgaatttttggaaattgttgggtttaaagtgtttaggaagtttggagtgatttttgttgtagggggaagagggaattatggaggtgttattgaatttttaggggttttgggattttttaatttggtgtttgttttagttttttgagtgtttttttttttttattttttattttgtttgtttttattttttgtggttttatttttgttgtgtagttggattttgtttggggttttttgattttggagtttgaattttagttggattagtttagtttgattagtttagttttgttttttttttggtaggattgtggttgagtagtttgtttagagatttagtgatagatagatgttgggatttatgatgatagaaggtgttgatggttgtgtttgttgagttttgtgtggggtagggggtgagtgttttttattgtgttttattttttttttttaggtttggtttggttgtagattttttgggttgtgatattggggagaggagagatttttaaatttttggatttgggaagtgaggagatttattttggtttttttattgtagtgggttggattttttttattaagttagtagttgagagtttagttttatttaaggggttattagattttttagttattaggggttttgatttttttttgtataaagttagtgggttttttaagtttttttatttttggagagtttttatttttttggtttttttttttattgtttttagtaaaggattttagggagtggagtttatggagtgggggtgggggttgtaaattgttagtattttgagggttagggagttgaagtaataaattggtaatgaattgagggttttttttgtgtttagttttgtgtttaattttgtgttatgttgttatgaattttgttgttattaatttatttaatataatttatagaggtagagttttgtttttttttttttatagggaaggaaattgagatatagagaggttaaagtttgtatagttggtgagttgtgaaattaggaggagtaaaaagatagtggagagagaattgaagaggttatgtttattaaattttaaattttttttagggttagataggattagtagatttgttgagatgaaaataatagattaagttgggttggtggtttttgtttgtaattttagtatttaggaggttgaggtaggaggattgtttgagattaggagtttgagattagtatagagagatttttatttttataaaatataaaaaaaaaaaattagttaggtttggtgaggttgtttatgtttgtaattttagtattttgggaggttgaggtgggaggattgtttgagtttaggaaatttgaagttttgttgagttttgattgtgttattttagtttgggtaatagagtgagattttgtttttaaaatataaattaattaataataaaaaataaaaataaattatatattaagattattagttgaatgaggtttggggttagataagtttgggttagagttagttttgttattttttatttgtgtgtttttgggggaggtagttttttgattggtgttttagtttgttggtttttgaaatggagatagtattgtttgtgttttggagttgttataaggattaattgatagtttatgtttagtaatgattatggagtttaggttttttagattatatggtttagttttttgggtttaaattttagtttttttattttttagttgggtaaagttagtaaagttatttaatttttttggtttttagtttttttatttgtaaattaatataattgtaattatttagggttaatgttaggatgaaaggaattgagaattagtaggtattttaaagagtatttggtatatttttgtgtaaatgttaaagatttaaaaagttgtttggttttttgggtaggtgagttggggatttttgttttgtattattttaagggttttttttgtgtttttttaggtttggaattagatagagtttgaatttgttgttattagtttgttgagtttgtgttttttgagaatagtaggggtttgggtattttttatgtatttttgggtttttggttttatttattttttttttatttattattatggttggggttatttttggatgtttttattttttaaagttaagatggtagttgttatttttgggagtttggaattaggtaatgtttgggggaggtaggggataggttggaatttggtgaagttttaaagtagattttttttattggggtgtagaagggaatttgttaattaaatagagtaatattagaaaggttatagaggttaatttagtggaatatggtttttttaaatagattttgtaattttgaaaatttatgtatgtgtaaatatatgtatatatttttatgtttttggatagtttatagttattataatttggtattttttaaaatatattatgtagatttttggatatataaggtaattttagagttatattaggatgaattttttaaaaagttatgtatttatttttatgtttttttattggttgtattataggataatttttatatgtgatatgtatttattttagtgtgttaaataaatattggtattttaagtgtgagtttttttgtttatttatttttttttattttatttttgtaggtttttaaagaatgttttttagagtttatttatttttttgttattgtattaatttttatattattatttgttattaatttaggggttggtaaatttaaagagttaagtggtatatagtatttgagattttgtgagttaggtaattttttttttgaatattgaattttgttattttagaatgaatgtaatagttataattatagataatagttatgattgtgttatttttttgtttgttttttttttttgagatgtagttttgtttttgttatttaggttggagtgtaatggtgtgattttggtttattgtaatttttgttttttgggtttaagtgatttttttgttttagttttttgag

SEQ ID NO: 692 - DNA, 6214 bp, Artificial Sequence
  chemically treated genomic DNA (Homo sapiens)
attaaatgagattttttataatattttatttgtttttggaaaatagatgatttttaattattggtttatttatattttgaatttttttataaaagatttggaatagttattttgatataaaatgaagtatatgaattgtatttatttggttttgaattatggttttgttatttattatttattatttttgtattttttaaattttgagatttggttttttaatttataataatggggattataattttattttgttgggttataggaaggataaaatgaaatagtaatgtagtatagtatttggtatatagttggtgttaaataaatatgttttgtttttttttatttaaatgtattttagatagaaaaaggataaggtggaattttaaatgatattgtttttttattatattgatatatgttaagtagaaatgtggattgattttgagttgtaattgttaatgtttgtatgtaaaagttaggtttaaagtaaatttaatttttttttataagtttagtattttgtgaatattttattaattttttagttatattatttaatgtaaaaaattttttggggaaaaatatgatgagtttttgtatattgttttttatattatttatttaaaggattattaaatattataaatttggttttttaataaaatatttatagtattagtttggttaataattttaaataaagtttttgtgattttgttagttttaaaaatatgatttttttttttttttttttttttttttaatatatattaatgttttttttattgaagagtagtatttagtttaggttttataagtatgatttaagttgtaaaatattaagtattaattataagtattattataattttgtgtgtgttaaggagaataagtaaaattgttatatagtagtggaggtgattgggggaaaaagtgaaaagtgatttgaattgattttttgttttttttattatattggagaatgtaagtgttttgtattttaagattaaattgagttttggttttattgatgtaattagtaattttatttattttttatattgtggaggttggtagggtagtggttgttgttaagtatattatttattagagtttgttttgttttatttttgtgttttagttatgttttttagaaatggggttatttatttagtaattattatatatatgtagtttattattttgtaattttttaaagtttgttgtggggagagaaggtagtaaaaagttaagaaggaagaattatagatgtgttattattaggaattgattttttattttggagaggagtggtgatattttggaatgggttttgtttggattatttttgtagattttgagttgttttgggataggggtggtttaggaaagtttggtgtagtgatgtgtttggggaaattttgttttgttttgtttgggtatattgtttgggttttgggtattaggatgggtgatttagggatggttattagattttgggtgaggaaaattagaaagttttttatggtggttgttgatttttttgaatattatttttttatttttatggataggaaatttaagttaaatttatagggatgggggtttagttttgtgattttagaaatggagggggtaggggattttaggtttttgtttttttttttgtagtagtagaaattgttgtggtagatgagggggaggtaaaattttgtattttttatttgaaatttttataggttgttgttgtttgtgttttgtgtgttggtttttttgtagtagttttttttttggttggatttgagagtttttgttttttggtgaatttgatttttattttttttttattttttaaagttgttaaggtttgggaaagtttttgatttggttgggttaaattttttaattttttgttggtttttgttttgttttttgttttttttatgtaaagttgattaaaattggttttttgtaaagttttagtgtttattttaaattttatgtgttattatattggtagttttttgagtgagggaaggaggtgagggtgaggatggaaggaatagatagattggttaatagatttattttaataatttaaattaaaattttgagtttgggggaaagatgtgagtgggattagaatgggttgagtggttagttttggggagtgaagtgagttggtgggggtgtgaggaggagatgtgttggttttggttgttttgttgtatttattttagtgttgttggatgggttttttatagttattttttgttatgggtttgttagttgtgttagtggtatttttttttttggtttgttgtttttattgttttttttttttttgtttgttttatggttggttttgttttgttgttgtttgagttttatggtagtggtggtggtggtggtggtggtggtagtggtagtggtagtggtagtagtagtagtagtggtggtggttttagagagggtttgatgttgatgttgattgtttgaaagttgtgtgtttggttagagatgtttgtgtgttgagtgagagttttgtgtttttgttgggtattgggttttgttttttttttttttttttttttttgttgttgggattatggttttgttttttttgttggtttttgtgtttgtttttagtagaatagtgattgttgtgtgtttttttatttttgtttataatatggtgtttaagtgatatttgttttttaaagtgaggtttggttgttgttattattgttgtgtgtatttaggggttgggttagtggaagatatgtttttggttgttgtgttttgtttttttttttttttatttttttttttttgtgttttaattttagtttttgggttttgtttatttttaggaagggtgagtttaatagatttgggggtgttggtgggaggtgggggaaagaaatgggaaaggtaggaggggtgaaggttgggagttttttattgttaagggtttaaggaggttggaggttttttgggaatgagggagaatagtggtttttgtttagttggggagggaggtgggtaaagtattgggggtgtagttttgagttaaggatttggggaggggtgtggagtgtttttttggtttgttttttttgggggtgtgtgtgtgtggatgtgtttagtttttgggtgtattttgtaatggtttaagattttttttttttagggttatatgttgggaaattatttgttttttattttttttgatggaggtaagggaggttttgtgtttaggagttttttgggggtttggtttttggtttgatttaagtttttttaagttgatgtttttttgttaaattgtggttatttgggattaattttttttgtattagttgttttttttgtattgtttttagtttaaatttttttttttaagtgtgtagagtttttggtttttagttgtgattttggaattgttgttttttgttttatgtttgttatttaaatttttaagaggggaaaatagggaggttttttaaggttgttttttttggtagaggttggagaattatttaaaaatattttgtaggtaggagtgtggggtttttgtttttttgttgattttaaataagagattagatttaaaaattaggttggttgtgggtggaggaggaggaggagggggatagagggaggggaggggttttgatttttttttttgtttaagatggggaagttttggattaaggaaatttaatgttttgatggtgatggagttttataggatggtgagagttttggggggaaggtttgggtgtttggggtgtgttttaagaggatttgattttgtgtttattgtgttaggagttgttgtgtgttaagtgtgtttgggtagaaatgtgtaaaagttgtagggttgagtggaaagttattgtagtttttggttagttgtttagtgaggggaagagaaaaagtaaagggagatttttgagttggtttgtttttttaaatttttaggttgtggtttaggtattttggtttttttatgtttagtgattatggtgtgtttgttgttgtgtttttagtgtatgtttattaatagtttttttttatttttttgggatttagatatttggagaatttttgtttgtttttttaagtaggtgtgaggatgagattagagttttaaatttagttggttaggtttgtgtgggtggtgtgaggttttttgttgggtttgtgagaggtaggtgttgggttttttttgttgtttttgttagtgtgttttttggtataggtttgaggttggggaattttgtggttatttagggaggttttaattgtttagggagtttgagaaggtggtaggaagtttttgttgtgtgtttttttttgaagttttggatttagggggattgtttaggttggataatatttgggtagatttaatgtggtttggggaagaaggtgaatggggttatttggtttttgtttttgttatttttttttatatgttatatttaggtgttgtaaatttaatttgggtttaaatttagttaatttggtagtattttttttgtgtaatttttgatggtaaaatgtgtttgtagaagtttggaggataaggagttgtgtattattttgtatttatgtataaaatgttttatttatttatattgtagagttatatgattattttttatagtgaaaagaagtttgttaatttggttggtttaaagtaaattagttttttttattttttgattaattattttagttaatatttttgtattagtaaaaatatatatagttgaagagagattgttatgtggttaatattgtttagtgttaattatttttatgtaaagaatgaatattttaaaataaagtaaattgtatgttatttttagtattaatttttatttatttttgttaattttgagaattagaggaataatttttaaaatagagttatttgatttgtaaaagtaatgtgagtggtggttatgttttagtgaattaagtattatatgaattgttaataatgggttaaagtggttgggtgtggtggtttatttttgtaattttagtattttgggaggtttaggtgggtggattatttgagtttaggagttttagattagtttggttgatatggtgaaatttggtttttattaaaaatataaaattagttgggagtgtatatttgtaatgttagttatttggaagattgaggtaggagaattgtttgaatttgggagatggaggttgtagtgagttgagattgtgttattgtattttagtttgggtgataagattaaaattttgttttaaaaataaataaataaataaataaataaattagttaaagtattattattatagatgttttgtatagaggattaatttgataagtatttatgaattgattgaatttatttagaagaatattatttttttttttgttttaaaagtaaagaaaatgattttttgttgttaataataaatttttttttttttattttttttattaaatttaagagtagtgtaattattttttttggttaggagaatttggaaaaattaaatgaggttggaggattttttttgaaggtggtagtaaaaagagttatttgaatatagaagttgatattgttttaagtaggattattttttttttttgtttaataaaggaaaattttaagtgtagttgtttaaagaatagttgttttagattgttagatttgtatgggttaatatggtggttagtagttatatatggttattgagtattttaaatgaggttggttggttaaagttgagatgtgttgtaaatgtgaagttttttttagattttagatttagtaaaaaaaaaaaaaaaagaatataaagtattttattaataattttttatatttataatatgttgaaatgatatttttgatatattgggttaaataaaatattttattaaaattaattttattttttaaaaattttttaatgtggttattataaatgtatatttatatatgtggtttttgagatttttatgtatttttataagttatataatgttaagtgatatttttagattttaatgtttttttggtttttttagtgtagaattagtagaaagggttgatttagttatttattgatttttattttttttaataaattttttagttagaattaaaatattggaaagtttttatttgaaattatagtagagtgaaat

SEQ ID NO: 693 - DNA, 6214 bp, Artificial Sequence
  chemically treated genomic DNA (Homo sapiens)
gttttgttttattgtagttttaagtaagaattttttaatattttggttttgattgggagatttgttggggagggtggggattagtaggtaattgaattagttttttttgttgattttgtattaaggaagttaaaaagatattggaatttgaagatattatttaatattatatgatttgtaggaatatataaaagttttgaaagttatatatgtaagtatatatttatagtagttatattaaaaagtttttaaaaggtgaaattaattttaatgaaatattttatttaatttaatatattaaaaatattattttaatatgttgtgaatataaaaaattattaatgagatattttatatttttttttttttttttttattaagtttgaaatttagaaagaattttatatttatagtatattttaattttgattagttaattttatttgaagtgtttagtagttatgtgtggttattaattattgtattaatttatgtaggtttggtgatttgaggtagttattttttgaatagttatatttagagtttttttttgttaaatagaggggaaaagtaattttgtttagggtaatattagtttttatgtttaagtaattttttttgttattatttttaagaaaaattttttagttttatttgatttttttaaatttttttaattaaagagagtggttgtattgtttttggatttaatagaagaaataaaagagaaaaagtttattgttaataataaaaaattattttttttgtttttggggtaaaaggaagaataatgtttttttaaataaatttaattaatttataaatatttattaaattgattttttgtgtaagatatttgtggtagtggtattttaattggtttgtttgtttgtttgtttgtttgtttttgagatagaattttgattttgttgtttaggttggagtgtaatggtatgattttggtttattgtaatttttgttttttgggtttaagtgatttttttgttttagttttttgagtagttggtattatgggtgtgtatttttggttaattttgtatttttagtagagattgggttttattatgttggttaggttagtttggaatttttgagtttaggtaatttgtttatttgggttttttaaagtgttgggattataggggtgagttattgtatttggttattttaatttattattaatagtttatgtaatgtttaatttattgaaatgtgattattgtttatattatttttatagattaggtaattttgttttaaaagttatttttttggtttttaaggttaatagagatgaataaaagttgatattgaaaatggtatataatttgttttattttaaaatatttattttttgtgtgggggtaattagtattgaatagtgttagttatataatggtttttttttaattatgtatgtttttattaatgtaagaatgttaattgaaataattgattaaagggtagggggagttaatttattttaagttaattgaattaatgaatttttttttgttataaggagtggttatgtgattttgtaatgtaaatgaataaagtattttgtatataaatgtaaaatagtatataattttttattttttaaatttttgtaagtatgttttattgttgggaattatatagagaaggtgttgttaaattagttgagtttgggtttaggttggatttgtaatatttgaatatagtatgtgaagggaagtgataaaggtaagagttaagtggttttatttgtttttttttttagattatgttgagtttgtttagatgttgtttaatttgagtggtttttttgagtttaaagttttgggagaaggtgtgtaatgaggattttttgttgtttttttaggttttttaaatagttggagtttttttaaatggttatgaggttttttggttttgagtttgtgttaaggggtgtgttggtgaaggtagtagaaagagtttaatatttgttttttgtaggtttagtgagaaattttgtattgtttgtgtagatttggttggttgggtttggggttttaattttatttttatatttgtttagggaggtaggtgagggttttttaggtgtttgggttttgggaggatgaaaggaagttgttaataggtgtgtgttgggagtgtagtagtggatgtgttgtggttgttgggtgtgggaagattgggatgtttgggttatggtttgagggtttgaagggataggttggtttggagatttttttttgtttttttttttttttttgttgggtgattagttaggggttgtagtagttttttatttagttttgtgatttttatatatttttgtttgggtgtatttagtgtgtagtggtttttggtgtagtgaatatagggttgagtttttttgggatgtattttggatgtttaggttttttttttaaagtttttgttgttttgtggggttttgttgttgttggggtattgggtttttttaatttagggtttttttattttgggtaggaggaggagttagaattttttttttttttttgtttttttttttttttttttttgtttatggttagtttgatttttaaatttaattttttatttaaagttaatagaggagtaggaattttgtgtttttgtttataagatatttttaaataattttttaatttttattgagagggatagttttaaggaatttttttgttttttttttttgaagatttaggtagtagatgtggggtggggggtagtggttttagggttgtagttgaaggttgagagttttgtgtatttggggaggagaatttgggttgggggtggtgtgggggaagtgattaatataagaggaattaattttaaatagttataatttaataaaagagtgttaatttgaaaagatttgaattaaattgggagttgagtttttaggaggtttttaggtatgaagttttttttgtttttgttgggggagatggggggtaggtgattttttagtatgtgattttgaagagggagggttttgggttattatgggatgtgtttagagattaggtgtgtttgtatgtatgtatttttggaggagataagttgaaaagatattttgtatttttttttgggtttttggtttgggattgtgtttttggtattttgtttatttttttttttagttgggtggggattattgtttttttttatttttaaggagtttttgatttttttggatttttggtggtgaaaggtttttagtttttgttttttttgttttttttattttttttttttgttttttgttgatgtttttagatttgttgggtttgttttttttgaaagtaggtgaggtttagaagttgaggttggggtgtagaaggaggggggtgggaagagggaggagtggagtgtagtggttgggggtgtgttttttattagtttagtttttgggtgtgtgtggtggtggtggtggtggttgagttttgttttgagagataggtattgtttaggtgttatgttgtgagtggaagtgggggagtgtgtggtggttgttgttttgttgggagtgggtgtgggaattggtggggggggtggagttgtagttttggtggtggaaggaggagaggaagaaaggggtgagatttggtgtttagtggaggtgtgaggtttttgtttagtgtgtgggtgtttttggttaggtgtgtggtttttgggtggttggtgttggtgttgagttttttttggggttgttgttgttgttgttgttgttgttgttgttgttgttgttgttgttgttgttgttgttgttgttgttgttgtggggtttgggtggtgatggagtggggttggttgtggggtgggtggggagggaggaggtggtgaaggtggtgggttgggggggaagatgttgttggtgtagttggtggatttgtggtagaagatggttgtggagagtttgtttgatagtgttgaggtgagtgtagtagggtggttggggttggtgtattttttttttgtgtttttgttggtttgttttgttttttggagttggttatttggtttgttttgattttgtttgtgttttttttttgggtttagggttttggtttgggttgttggggtgggtttattggttggtttgtttgttttttttatttttatttttattttttttttttgtttggggggttgttagtgtggtggtgtgtggggtttggagtgggtgttggggttttgtaagaagttaattttaattaattttgtgtgggggaagtgggaggtggagtgggggttggtggggagttgggaagtttggtttagttgggttgggggtttttttggattttggtgattttgggagatgagggaggggtagggattgggtttattggggagtagggatttttgagtttagttgagggaggggttgttgtggggagattggtgtgtggggtatgggtggtggtgatttgtgggggttttgggtagggggtgtagggttttgttttttttttgtttgttgtagtggtttttgttgttgtaaagaagaaagtggaagtttaaggttttttattttttttgtttttgaggttgtagagttagatttttgtttttgtgagtttaatttgagttttttgtttatggaggtgagagggtgatatttaaggagattagtggttgttgtaaaaggttttttggttttttttgtttgggatttggtgattgtttttgagttatttattttagtgtttaaaatttaaataatatatttaaatagggtaaaatagaatttttttgggtgtattattatattgagtttttttgaattgtttttattttagaataatttggggtttgtgaaaataatttagataagatttgttttaaggtattattgtttttttttggagtggaaaattaatttttgatggtggtgtgtttgtgattttttttttttgattttttgttgttttttttttttgtagtggattttaggggattataggatgataggttgtgtgtgtgtaatagttattgagtgagtgattttatttttggaaagtatgattgaaatgtgggggtggaatggggtaggttttgatgagtggtgtgtttggtggtagttgttgttttgttggtttttgtagtgtgagaagtagatagggttattggttatgttagtaaaattgaggtttagtttaattttgagatgtgggatatttgtattttttggtataatggagagggtgggggattagtttaaattgttttttatttttttttttagttatttttgttgttgtataataattttgtttgttttttttaatgtatgtagagttgtaatagtgtttatgattggtgtttagtattttgtgatttggattatatttgtaaaatttgaattaaatgttgttttttaatggaaaagatattgatatatgttgaaagaaaaggaaagaaagaaaggaaattatgtttttaagattggtagaattataagaattttatttaaaattgttaattagattaatattataaatattttattaaaaagttaaatttatgatgtttaataattttttagatgggtagtgtgaaaaatagtatgtaagagtttgttatatttttttttagaaaattttttgtattaaataatatagttaaaaggttaataaaatgtttgtaaagtattgaatttgtggaaagaaattaaatttgttttgagtttgatttttatatataaatattaataattgtaatttaagattagtttatatttttgtttggtatgtattagtgtgataggaaaataatattgtttagaattttattttattttttttttatttggaatgtatttggataaggaaggataaaatatatttatttagtattaattgtatgttaggtattgtgttatattattattttattttattttttttgtgatttagtagggtaggattatggtttttattgttatagattaggaaattaaattttagaatttaaaaggtataaagatgataaatagtaaatggtagagttataatttaaagttaggtggatataatttatgtgttttgttttatattagggtagttgttttaaattttttgtggaaaaatttggggtataaataagttagtagttagaggttatttattttttagaaataaatagagtattataagaggttttatttggt

SEQ ID NO: 694 - DNA, 6127 bp, Artificial Sequence
  chemically treated genomic DNA (Homo sapiens)
ttggggttgggtttggtggtttgtgttagtaattttagtattttgggaggttaaggtagatagattatttgaggttaggggtttaagattagtttggttaatatagtgaaattttgtttttattaataatataataattagttaggtgtggtggtgagtgtttgtaattttagttatttaggaggttgaggtaagagaattgtttgaatttgggaggtagagattgtagtgagttgagaatgtgttattatattttagtttaggtaataaagtaagattttattttaaaaataataataattaaaaaaatttatttagattttagggtgattagggaatttttagtgtgtgtttttgtgtatttttgtatggtttaggtagagtttgggtggggtttttttattttaattgtatttttatgtgttgtgtgtttgtgtttattatatatgtttatatgggattttattttgggtttatatttgtgttattttttttttttttttttttttttgagatggagttttattttgttatttaggttggagtgtagtggagtgattttggtttattgtaagttttgttttttgggtttatattatttttttgttttagttttttaagtagttgggattataggtgtttgttattaggtgtggttaattttttgtatttttagtagagatgaggttttattgtgttagttaggatggttttgattttttgattttatgatttgtttattttggttttttaaagtgttggattataggtgtgaattattgtgtttggtttttttttttttttttttttttttttttttgagatagagttttggttgggtatggtggtttatgtttgtaattttagtattttggaaggttgaggtgggtggattaggaggttaggagattgagattattttggttaatatagtgaaattttgtttttattaaaaatataaaaaattagttgggtgtagtggtgggtgtttgtagttttagttattggggaggttgaggtaggagaatggtgtgaatttgggaggtggagtttgtagtgagtggagatggttttattgtattttagtttgggtgatagagtgagattttgttttaaaaaataataataataataaatataaaaataaagaaaaagaaggttgggtgtggtggtttatgtaggtaattttagtattttgggaggttgaggtgggtggattaggagtttaggagattgagattattttggttaatatggtgaaattttgtttttattaaaattataaaaaaattagttgggtatggtggtgggtgtttgtggttttagttatttgggaggttgaggtaggagaatggtgtgaatttgggaggtagagtttgtagtgagttaagattatgttattgtattttagtttgggtgatagagtaagattttgtttaaaaaaataaaatataaaaaaaataaataatgaaaaagaaaaagagatagagttttgttttgttgtttagtttggaatgtagtggtgttattttagtttattgtaagttttgttttttgggtttatgttatttttttgttttagtttttttagtagttgggattataggtgtttgttattatgtttggttaattttttgtatttttagtagagatggggttttagtgtgttagttaggatggttttgatttttagattttttgatttgtttgttttggttttttaaagtgttgggattataggtgtaagttattgtgtttggttgtttatttgatgttttgagtgtttttgtatgtggttttgtttttgtgattgtattttattttgtgttttttatttgtggtaataggggttatgtgatggtatgattattttatgtgtttgtatgtatttttgtgttattataattattatggaagaagtgtggttgtgtgataaaataagttttggtgtgtaaaattgtgtttttttttgtttttgtttttttttttttttttgagatggggttttttgtgttgtttaggttggagtgtagtggtataattgttgtttagtgtagttttgaatttttggttttaagtgatttttttgttttaatttttatatatttgggattatagatatgattataggtatgtattattatgtttagtttattaagaaaaaatatttttgtagagataggggttttgttatgttgtttaggttggttttgaattattggttttaagtgattttttggttttggttttttaaaattttgagattataggtttgagttattgtgtttgttttattttgttggatggggttgttttattaggatgtatttgttatttatttatgtatgaatatggttttgtttgtgtttttattataaatgttatgtgattgatgtgtttgtgtgattgtttgtgtttttatttatgtgtgtttgtgtttgttgtgaggttggttggattagaatgggttggtgttaagatgtggtaggtgtattttgtgtttgtgtgatattgtgggttggggagtttgtttgtgattttgtgtgtagggggtgggaagtgggagttaaagttatagaggatagtaggttgtgtggatgtagtgatgtgtgtagagggttttttgttttgttgtttttttttgggaggtgttttttttgtgttgtgggggtgtgtgtgttgtgtgtgatgtgagatatgatgggggttgttgtgtgtgtggaatttgatgtggttgtgtgtgtaagtgtggggggtggaagggtgggagttttgtattggttgtgtgtgtgtgtgtgtgggtggtggtgggggttgggtgagtggaggtgtgtagggtaggattagttttgttttggttgggattttggggtgttggtgaaatttgggagggggtttttgttaatttttttttgtttgatttgaaatttgtggttttttgattgagtgtttgggggtttttttagtgtttgatgggagggtagtttttgttgggggagggattttttttatggagttgagattttttttttagttgttatgggaattagagttttttgtgtagttaggtgtgtgttttttttttttgtttagttattttgttttttttttagttgtttagtttattgataatgtgttttttgtttgtgattttgggagaagggggttggggttagtgttgtttgggtgtgtgtgatttaggttagtttgggggttttttggttgtagttggttttgtttttgtttttttgtttttgtgatttattttttttggttttttttgtgtgtgatttaggtttttggggagggggttgtggagtttgggatttttatagatagtggggttgagaattaagttttggggattttgttttttgtggggaaggttttttttattagtgagtatttgagggttagtgattttttttagtaagttagaggtgttttttttaattttgtttttgaattggtagattttttatttttatttttgtaaatttttgggaatttagtttttaatttttttttttagtttataggaagttttggtagagtttgttgtggtgatgaaatggttaaagttgtttttttatttattttatttaggggtttattttgatttagagtaagttggtgttttttttgagtttggttttttgggggtttgggtgtatattttattttatatgtattatttttagagaggggaggatggtgtttggtgagttggttgggggttttgggtagtatatagagttgggtttaaattttgtttttgtttttattgttgtttggattttagtttttttatttgaaaatgagggattattatgtttagtttgttgggttgttgtggggattaggtgaataatagatgggaaattttgtatttagggttgagtatgggagttagaagagggttttttttgttttttaggtttgggtgttagggtgtttagtagaagtgagtttttgttgggtaggttatgttttatttagatattttaaggttatggggtttattttgtttattttttgtttgaggtaggtatttaggaagtgagaggtggggtaggaatgaggtataatttgttgggtttgttatttttttgttttttatttttattttagtgttttgagagggtttttttatgttgtagttttatttttgttgttttggatgtttgggttttgatttgtgggtggtttgagggaggggatgttggatggagattgtgttttgggaatattttgtggattgttggttggatagatggaggagggttagttttttttggggtagggtagatattgattgggggtagagtaaatatggtttagggtgattagatagggggtgggtggggggttgtaggaatgtatatatagttattttgagagagttagtttagatatataaatttttgttattttggttatagagagattgttagttagggatatatagatagggttagatatatagttgggtaagatgatttagtaatgattgttatatatggatatagtgatagattagatttttaagtaagagatatatattgttaaatatatgaatgtatttattggttaaaaatatgtaggtaggttgtgtgtggtggggataaattaatttagtatataagtatgatagatataaatatatagagattgatatttaggtgagaggtatatagtaaggtagatataatggtgtgtgatatatatggagataaatataataggttagaaatataggggtaagatagatatagagtgaattatatgtgagataagtaggtaatatgtgtatgttgataggagagatagttatttttagtattagtattttgagagttatatgagagatatgtagatataggtatgtattattagattttgatatgtaagagaaggtaatatatatatattttagatttttaatttagaagatagagataagataagagagataaatttagggatagagatgatgtgtttatagtatggtagagagtttttggtattttggtttattattgttgtatatatattagagatgtttttagggatattaagttgaagttttagaggtatatattattttattaggaatatatatatgtgggatttggtaatagattgggtagatttgggtagattgatatatttatagatatggtttggttagatagttatatttagtgtagagaggtatagataggttatagtgggatatttataaatatattggtatagaaagattatgataaaatttgtttgtatatatatatatgtatatatataaatggagattagtaataggtaatatatagattagttatagaatatatatatggaaataagttatagattttatatatagagattatatatatatattaaatataaattagttatagattttttttttatatatatatatatatattagattgtatatatatatatatatagattagttatagattttttttttatatatatataaatgtatattatagattgtatatatatagattagttatagattttttttatatatatataaatagattatatatatatatatagattagttatagattatatatataaatatatatatatattgatataagttagttataggaattttgaaataatttatatgtatatatatttagattatgtgtaatttattttatagagtttatatatatatagagtggaatagaattttatatagataagttttatatagatttttgtatttagggttgggtatagaagtgggtagagggttatttttgttttttaggtttgggtgttagggttggattagtatatatttttatatgtattttataggttagttatatgtttgttttttggattttgttaaggttttgtgggggtattggatattttagtttgtttttgttttatagagattttggtattttttttttttaaatattatttttatttttttttttttttgtttttgttattttttttaggaggtttagtttagtagtttttgtttttgttggggtgggggtttgttataaagaggttatttagggttttggtgatgtttaggttttttaaggttttattagta

SEQ ID NO: 695 - DNA, 6127 bp, Artificial Sequence
  chemically treated genomic DNA (Homo sapiens)
tgttggtgaagttttgggggatttgggtattattaagattttgggtgatttttttatagtaggtttttattttagtaggagtagaggttgttgagttaggttttttaggggaagtggtaaaagtaaagagggagggaagtgggggtgatgtttggagagaggaagtgttaggatttttgtggggtagagatagattggggtgtttagtgtttttatagaattttggtaaggtttagggggtaagtgtgtgattggtttatagggtgtatgtgagagtgtgtgttggtttaattttgatatttaggtttgagagataggagtagttttttgtttgtttttgtgtttagttttggatgtaaaggtttatgtagggtttatttgtgtagagttttgttttattttgtgtgtgtgtgagttttataggatgggttgtatatggtttagatgtatgtatgtgtaggttgttttaaagtttttatggttaatttgtgttggtgtgtatgtgtgtttgtgtgtgtggtttgtggttggtttgtatgtgtgtatatgatttgtttgtgtgtgtgtaaaagaggtttgtggttggtttgtgtgtatatgatttgtaatgtgtatttgtgtgtgtgtgaaaaagaggtttgtggttggtttgtatgtatgtgtgtatatgatttggtgtgtgtgtgtgtgtgtgaaaaagaggtttgtggttggtttgtgtttggtgtgtgtgtgtggtttttgtgtgtgaggtttgtggtttgtttttatgtgtgtgttttgtggttgatttgtatgttgtttgttattgatttttgtttgtatgtgtgtatgtgtgtgtgtgtaaataggttttgttatggtttttttgtgttgatgtgtttatgaatgttttattgtggtttgtttgtgtttttttgtattgggtgtgattgtttggttagattatgtttgtgaatgtgttagtttgtttagatttatttaatttgttgttaggttttatatgtgtgtgtttttggtgagatggtgtgtatttttaaggttttggtttggtgtttttgggagtatttttgatgtgtgtgtaatagtggtgggttagggtgttagggattttttgttatattgtgaatatattatttttgtttttaggtttgttttttttgttttgtttttattttttgagttggagatttggggtgtgtgtgtgttgtttttttttgtgtgttaggatttgatagtgtatgtttgtgtttgtatattttttgtgtggtttttggggtgttggtgttgaaagtgattgttttttttattagtatgtatatgttgtttgtttgttttatatatagtttattttgtgtttgttttgtttttatgtttttagtttattgtgtttgtttttatgtgtgttatatgttattgtgtttgttttgttgtgtgttttttatttgaatgttagtttttgtgtgtttgtgtttattatgtttatgtgttgggttgatttatttttgttgtatatggtttgtttgtgtatttttgattagtggatgtgtttatgtgtttgatggtgtgtgttttttgtttgagggtttggtttgttattgtgtttatgtgtgatagttattgttggattattttatttagttgtatgtttgattttgtttgtgtgtttttggttggtagtttttttgtggttaaggtgataggggtttgtgtgtttggattggtttttttggggtgattgtgtgtatatttttatagttttttgtttgttttttgtttggttattttgggttatgtttattttgtttttagttaatgtttgttttgttttgggaggggttgatttttttttgtttgtttagttagtagtttataggatgtttttgagatatagtttttatttgatgtttttttttttgggttatttgtgggttaggatttaggtgtttagggtggtgggggtggggttgtagtgtgggggggtttttttagggtattggaatgagggtggggggtggggaggtgatgggtttaataggttgtgttttatttttgttttgttttttattttttgggtgtttgttttgggtagggggtggataagatgaattttatggttttagagtgtttgggtggggtatggtttgtttggtaaggatttgtttttgttgggtattttgatatttaggtttgagaaataggaggagtttttttttggtttttgtgtttaattttggatgtagagttttttatttattatttatttaatttttataataatttaataagttggatataatgattttttatttttagatggggaaattgaggtttaggtagtaatgagggtagagataggatttgaatttagttttatatgttatttaagatttttagttagtttattaagtgttatttttttttttttaaaaatggtatatgtggggtggagtatgtatttaggtttttaggaggttaggtttgaggggggtgttggtttgttttgagttaaaatgggtttttggatgaaatgaataagaaaatggttttaattgttttattgttgtgatgggttttgttaaaattttttgtgggttgggaggaggggttgggggttgggtttttggaggtttgtaggggtgggggtggggggtttattaatttagaggtggagttggggggggtgtttttggtttgttaaggggagttgttggtttttggatgtttgttggtgggggaggttttttttgtggagagtgaagtttttagaatttggtttttggttttattgtttgtaggggttttagattttgtagttttttttttaggggtttgagttatatgtggggaaagttgggaggggtgagttatgggggtggagaagtgggagtgaggttagttgtggttaggggatttttgggttggtttgagttatgtatgtttgggtgatgttgattttagttttttttttttgggattatgagtgggaagtgtattgttagtagattaggtagttggaggaaaagtaggatggttgggtggggaaaggaaatatgtgtttggttatgtgggaagttttggtttttatggtaattggggggggggttttagttttatgggaaaggttttttttttaatagggattgtttttttgttaggtgttggggaagtttttgggtgtttggttgaggggttataagttttggattgggtaggaaggggttaatggaggtttttttttgggttttattggtgttttaaggttttggttggggtggggttggttttgttttgtgtgtttttgtttgtttagtttttgttattgtttatgtatgtgtgtatgtagttagtgtagagtttttgtttttttattttttgtgtttgtatgtatgattgtgttgggttttatgtatgtagtgatttttgttgtgttttatgttatgtatgatgtatgtgtttttgtaatgtggggagggtgttttttggaggggaatggtggggtgggaggttttttgtgtatattattgtgtttgtgtagtttgttgttttttgtgattttgatttttattttttgttttttatatataaagttataaataaattttttgatttatagtgttatatggatgtaggatatatttgttatattttggtattaatttattttagtttagttagttttgtagtgaatatggatatatgtggatggagatgtagataattatataggtatgttagttatatagtgtttgtgatagggatgtaaatagagttatatttatatataggtaggtggtagatatattttgataaagtaattttatttagtaaaataggatgggtgtagtggtttaggtttgtaattttagaattttgagaggttaaggttagaggattgtttgaggttagtagtttaagattagtttgggtaatatagtaagatttttgtttttataaaaatatttttttttaatgagttgggtatggtggtgtatgtttatagttgtgtttatagttttaggtatgtgggggttgaggtgagaggattatttgaggttaggaatttaaggttgtattgagtagtgattgtgttattgtattttagtttgggtgatataggagattttgttttaaaagaaaaaaaaaaaataggaatagggagggatatagttttgtatattagggtttgttttgttatatagttatattttttttatggtgattgtggtggtatagagatatatatagatatataagatagttatgttattgtatgatttttgttattataaatagggggtatgaaatgggatatagttatagagataagattatgtatagggatatttaaaatgttaagtggatggttgggtgtgatggtttatgtttgtaattttagtattttgggaggttaaggtgggtggattaggaggtttggagattgagattattttggttaatatattgaaattttgtttttattaaaaatataaaaaattagttaggtgtagtggtgggtgtttgtggttttagttattggggaggttgaggtaggagaatggtgtgaatttgggaggtggagtttgtagtgagttgagatggtgttattgtattttagattgggtgatagagtgagattttgttttttttttttttttgttatttattttttttatattttatttttttagatggagttttgttttgttgtttaggttggagtgtagtggtatgattttggtttattgtaagttttgttttttgggtttatgttatttttttgttttagttttttgagtagttgggattataggtgtttgttattatgtttggttaatttttttgtagttttagtagagatggggttttattgtgttagttaggatggttttgattttttgaatttttgatttgtttattttggttttttaaagtgttgggattatttgtgtgagttattgtgtttagttttttttttttttatttttatatttattattattattattttttgagatggagttttgttttgttatttaggttggagtgtagtggagttatttttgtttattgtaagttttgttttttgggtttatgttatttttttgttttagtttttttagtagttgggattataggtgtttgttattatgtttggttaattttttgtatttttggtagagatggggttttattgtgttagttaggatggttttgattttttgattttttgatttgtttattttggttttttaaagtgttgggattataggtgtgagttattgtgtttggttgagattttgttttaaaaaaaaaaaaaaaaaaaaaaaaaaaaaggttgggtgtggtggtttatgtttgtaatttagtattttgggaggttgaggtgggtggattatgaggttaggagattgagattattttggttaatatggtgaaattttgtttttattaaaaatataaaaaattagttatatttggtggtgggtgtttgtagttttagttatttgggaggttgaggtaggagaatggtgtgaatttgggaggtggagtttgtagtgaattgagattgttttattgtattttagtttgggtgatagagtgagattttgttttaaaaaaagaaaaagaaaaaaagaatgatatagatatagatttaaagtgaggttttatatagatgtatatagtagatatagatatataatatatgaagatgtaattggagtgagagagttttatttaaattttgtttggattatatagagatatataggggtatatattagaggttttttagttattttaaaatttggatgggtttttttggttgttgttgtttttgagatggagttttgttttgttatttaggttagagtgtaatggtgtgtttttggtttattgtaatttttgttttttaggtttaagtaatttttttgttttaattttttgagtagttgggattataggtgtttattattatgtttggttgattattgtattattagtagagatagggttttattatgttggttaggttggttttgaatttttgattttaagtgatttgtttgttttgattttttaaagtgttgggattattggtgtgagttattaagtttggttttaa

SEQ ID NO: 696 - DNA, 6108 bp, Artificial Sequence
  chemically treated genomic DNA (Homo sapiens)
ttttaattttaagggaaaaaaaattagaaatagtaaatatattagtaaagagatatttattttttttaattaagtttaaatttagtgtatataatagaaaggttggttttttttttaaagattttttagaaataattttagtttgttttaagtattaaaaattttataattttaaagtggatattattttttttattaaattttattaaataaaaatttattaaatatttattttattaatgatatattttatttttgtttttttataattaattaatgggttagttggtgttattttaaagttttatgaagttatttagttaaaataatgttataatttaattttaaatataaattttttgggtattgaaaatgttttaaaattagatagtggtaatggttgtataatgtagtgaatatattgaaaaaaaatatattgaatttatattttaaaagagtgaattttatgttatataaattttatggtaataaagttgttagtaaaaaataataataaaaataaattttttattttgtattattaagttttatttagtttttatttgaaattttattttaaattattgtttgtttggttaagtttaattaatatgttgtattaatttaggttatttaaaaataaaaaatatatatatatttttttaaaatgttttttttttttaagaagggttatagttttttagagataagttgagaaaatattttttatattagtttttaatggaaattaaagatgtgtagttgtgttgttttttggattttataaatttttggttattgttgtgatttaaaattattatttttgtagtataaaattttaattattataatgtaatttttaaagtgttagataaaaagagaatatttattaattttttgaataaaaaggattaaattttttatgtaaagataggtttttagtttaaagaaagtttgattttttgttttttagaattttggtttaagtattttaagttgatatagttgttatttatttttaaaaaaaaaaaaaaagttattttgtttaatgataaattatattataaagaatagtggtttattaagttagagtgtagtaattatgttattgagattttattaaggttaaattataaatagatttggtatttgttagtgtttttagtgttgagttgtagttgtagattagagtaatttttttatgggaattatgaaattttaatttttttttttaagggttttttagtttagttgattatttggaagaggaaaagattagtattatttttttaaaaggtgggggttggggtggtgagtagtttgaaatagaggaggttattggaatttatttataatatgaaatgttatattaagaagaatatgaatataattttaattatttaagtatttatgataattaaagatttttttaattatttttattttaaaggatgaagtagaattagtggagtataggagtagagagaggtagggataaaatgatttttttgttatgatataaataatgattgttttgtgtttatagtgattgttgtggtagatattgttaaattattttaagggattaagttattttatgtatgaagggtgtggggaatagtgttttattatttttaatatatttatttttatttttttggaaaaagaggtataattaggagagtaggtaggtttaaagtaggtataaagttattgtttgtggttttgaatataaggatattattgtttgtgtatttggaatataaaagagggtattttatgtggaggttggtgaagagttgggaattttgataggtttggaaagaaataaagttttagtttgaagtaagtaagtaagtaaggatggatttttaggttagttattttattgatattatttatatttttttatttttttgtgtttttttttaaagttgttggaatattttttttaaatgtttatttgttttagttattaagagaggaagaaagagaagggatttttgtttgtaaaaaataaatttgttgtttagatatgtataagggtagaagtagaataattaatgtgggagaattttaaagaagtgtttaatagggttgaggttatttagttagttgtttttttttattaagattttttttttattgataaaagtgtagatattttttttgtataatgatattgatttaattgtatggtaggaggagagttgtatgggattattagattggtgtgtgtaagttgtagttattttaatatttatgagtaggtttttattatttttaggtttttaagttgtatgaggaagatattatgttaaagggatatgtatttattatatttattgtaatttatttgttgtgtttttaagtagttttattttttatatatgttgtggattatagtaaaatttagttatttttttttttaagattttttgaaattttttttgttgtttttgtgtttatttgtttttagtttttttgtttgtgtagaaattaaatggtttttgtgtgataaatataaagttatttgtggttttgtgtggtagaagtgaaaagagtattggatgattgtggagagatttgggttgtgtttttggtatagttatggttttgttgtgtgtgtttatgttatgtatttttatttatttgtttgtaaaaatgaaggggatgatttattttgaaggttgttggtggttttgttgtgggttgagtagggtgttttgagttatttgttgtatagttttttaggtgggtgttttttttagatttgttttgtttgggatgtttgggttttagggtgtttttatagtttgttttggtttgtttaggtgagtgtgatttatatttatggtttgtgggtgtagtgttttttggtggttgtggttagggatgtagtttgtgtttttgtttgtttattttgattttatttgtttgttttttagtatatgattttgttattagattttgggtttataggtttaggaggtggtggtaggagattagggggaggttatatgttgttttttaagtttttagtgttttttgaattgtttgtagttttggttatattttgttatgttttgaggaaatgtaaaggggtgatttttgtgataattgagttggagggtaggggtgtggtagtagttattatttatttgtgtttttgttttaggataattgtgttagttgtttaattatgtttttgagtatgagttttgtagtaaaataagtttttatagtggtattggttgttatattgtgtaagtgtgttgtataaagtatttttaaggttgaagggaattgtagttttttttttgagtgtttagggttgtggatgtggtgaaggattatattttttagaagtgttggtgatattttgggggtggtgtgggttgtttttttttttattgagtttttggttttgttttatttttttttgtgtttttgtgagattgtttggaatttttttaggggttgtgttttttgggggaggtagttgggaggtttaattgtggttttgtgtttgtatatagtgttgtttgtaggtagagtagttttattttgtgtggttgtgtagttgttagaaaagattgtgaaggttattgtagtttgtgtttaatttgttgagagttgttaggttggttagttttagtttttatttgttgtggtagatatgattgtttgtttatggtttgattttgtagtttgtgtagatattgttttttttattttaatattaattgtttattaatgttttgttgtttggtttttagataataaaatgttaggattatagttttagaagtggtaagagttttagaaatgttatgttaatttatttttttttttttataaatgaaattgaagtttttagaaagattgatttttttatttttttgttttattggtatttttagtattattaaataaaagttattgttgagtttttttttattttgtatttgatgttttatatattatttttgttttttttaatttttattatagttttatgagtaggtattatgagtttttttttttttttaaggagtttggttttgttgtttaggttggagtgtaatggtgtgattttggtttattgtagtgtttgttttttgggtttaagtagttttttttgttttagttttttgagtagttgggattataggtgtttgttattatgtttggttaatttttgtattttttaagtagagatagggttttgttatattggttaggttggttttgaatttttgattttaggtaatttgtttgttttggttttttaaagtgttgggattataggtgtgagttattttattttgttgtatttttttttaatttaaagattaaaaaagaagaagaagaagaggaagaggaagaaggagaaggtaaagtgatttgtttatttttataatagttagttagttagttagtgtgaagatattattgtattgtaaagtagtatatttttgtgtatggattgatagattaatgtaatagaataaagagtttttaaatagattggtgtatttatgtaatttgatttgtgatagaaaattttatgaatttgtggggaaagtaagaagagttagtaaatagtattggaataattggttatatatatgaaaaaataattagggattattgttttatattatatagaaaaaatttattttaggtagattaaatgtttaaatgtgaaagggaaaatttaaaaatttttagaagaagataggaaatatttttatgaatttgggagtaggaaagaattttttaaataagaaataaagaataaaggaagaaagattgataatttttgttatattaaaagatggtataaattgaaaagataaattataagttataattgataaagtttttgaataataaatatttaaaataatttttaagtttagtaagaaatggtagataatttaataggaaaataggtaaatgatatgaatagatagtttatagaataggaaatttgagtagttatttaaatatgaaaagatatttaattttatttataattagggaaattgatttttttttttttttttttgagatagagtttttttttgttttttaggttggagtgtagtggtgttattttagtttattgtaatttttatttttagagtttaagtaatttttttgttttagtttttggagtagttgggattatagatattggttattgtatttagttgatttttgtattttttgtagagatggggttttattatattggttaggttggttttgagtttttgattttgtgatttatttatttaggttttttaaagtgttgggattataggtgtgagttaatatgtttggtttggaaatgtaaattaaaatagtaatgagatattattttattaaagattttagtattttttaataatgttttaaatattgtaatatttaaaattgtagatttgatattattatattttttaaaaagtttttaaattttgttgaaatattttatatatgttgattatagtttgttttttattaaaaaagaatagatgaatattagatagttttggtggtaggttttaatatattgtagtattgttttggtttgtttaagtatagtttgagtgaaagaattatatttataaaattatttttttaaaatgtgtttgtgttgtgaattgtttagaggggtgatattttttaatttttaggtaagggggttagagaatttatgttgtagtgtagaattgtgtgtttttttttttttttttttttttttttttagattttggtttattgtaatttttatttttagggtttaagtgattttgatttttttgttttagtttttagagtagttgggattataggtatgttttattatatttggttaatttttgtatttttagtaaagatggggttttattatattgtttaggttggttttgaatttttgagtttaagtgattggtttattttagttttttaaagtgttgggattataggagtgagttattgtgtttggttagaattgtgggtatttttaaataatatttatgttgtgtaatgtattaaatatatttattaaatatttggtagagatgtagtgga

SEQ ID NO: 697 - DNA, 6108 bp, Artificial Sequence
  chemically treated genomic DNA (Homo sapiens)
tttattgtatttttattaaatatttaatgaatatgtttagtatattatataatataaatattatttagaaatatttataattttggttgggtgtggtagtttatttttgtaattttagtattttgggaggttgaggtgggttgattatttgagtttaggagtttgagattagtttggataatatggtgaaattttgtttttattaaaaatataaaaattagttaggtgtggtgggatatgtttgtgattttagttgttttggaggttaaggtaggagaattagaattatttgaattttggaggtggaggttatagtgagttgagatttaaaaaaaagaaaagaaagaaaagaaaagatatataattttatattgtaatatagattttttagtttttttgtttgagggttgggaagtattgtttttttaaatagtttataatataaatatattttgagggggtaattttgtaagtataatttttttatttagattatatttggatagattaagatagtattatagtgtattgaagtttgttattaaggttgtttggtgtttatttatttttttttaataaaaaataaattataattaatatatatgaagtattttagtgggatttagaagttttttaaaaaatatgatgatattagatttgtagttttgggtgttatagtgtttgaggtattgttggaaggtattagaatttttggtgaggtggtattttattattattttaatttatatttttaggttaggtgtgttggtttatgtttgtaattttagtattttggggggtttaggtggatggattataaggttaggagtttaagattagtttggttaatatggtgaaattttatttttatgaaaaatataaaaattagttgggtgtggtggttggtgtttgtagttttagttattttagaggttgaggtaggagaattatttgaattttggaggtggaggttgtagtgagttgaggtggtattattgtattttaatttgagggatagagaaagattttgttttaaaaaaaaaaaaaaaaaaattaatttttttgattatgaatgagattgggtgtttttttatatttgagtggttgtttaagttttttattttgtgagttgtttgtttatgttatttatttatttttttattgggttatttgttgttttttattgaatttagaaattattttgaatatttattatttaaaaattttgttagttataatttgtggtttatttttttaatttatgttattttttaatatggtaaaaattattaatttttttttttttattttttgttttttgtttaaaaagtttttttttatttttaagtttataaagatattttttatttttttttaaaagtttttaagtttttttttttatatttaagtgtttgatttatttgaaatgggttttttttgtgtggtatgaagtggtaatttttgattgtttttttatatgtataattaattgttttagtattatttattgattttttttgttttttttatggatttgtaaggttttttgttatagattaagttatatggatgtattagtttgtttgggggttttttattttattgtattggtttattaatttgtgtgtaagaatatgttgttttatgatatagtagtgtttttatattagttaattagttagttgttataaagatggataagttattttatttttttttttttttttttttttttttttttttttttttttaatttttgaattaaaaaaaaatatggtggggtgaggtggtttgtgtttgtaattttagtattttgggaagttgaggtgggtggattatttgaggttgggagtttgagattagtttggttaatatggtgaaattttgtttttatttaaaaaatatgaaaattagttgggtgtggtggtggatgtttgtaattttagttatttgggaggttgaggtaaggagaattgtttgaatttggaaggtggatgttgtagtgagttgagattgtgttattgtattttagtttgggtaatagagttagattttttaaaaaaaaaaaaaaatttataatatttatttatagggttgtaatggagattaaaggaaataagaatggtatgtaaagtattggatataaggtagggaagaatttaatagtggtttttatttaatgatgttgaaggtattgatgaaatagagaaataaagggattaatttttttgggagttttagttttatttataaaaagaagaagatgagttagtataatatttttaaggtttttgttatttttaagattgtgattttggtattttattatttagagattaggtagtgagatattgatgggtagttggtgttaaagtgagaaaggtggtatttgtgtagattgtagggttgaattatgagtaagtaattgtatttgttataatagataagaattggggttggttggtttgatgatttttaatgggttagatgtgggttatgatgatttttatgattttttttggtagttatatggttatgtagggtgggattgttttgtttatgaatagtattgtgtgtgaatatagggttatggttaagttttttggttgttttttttagggaatatgatttttgagaagattttagatagttttgtagaggtatggggaaggatggaatagagttgggagtttggtgggaagaggggtagtttgtattgtttttgggatgttattggtgtttttgggaaatgtagttttttgttgtgtttgtagttttgggtatttggaaggaggattatagttttttttagttttgggaatgttttgtgtagtgtgtttgtgtggtgtggtggttgatgttgttataaaggtttgttttgttgtagggtttatgtttgggagtgtggttgagtggttggtgtggttgttttggagtaggggtgtaggtaggtgatggttgttgttgtatttttgttttttagtttggttgttatggggattatttttttgtatttttttggggtgtggtgggatgtggttagggttgtgagtagtttgggggatattggagatttggggaatggtgtatggtttttttttggttttttgttgttgttttttaggtttgtgagtttggggtttggtgatggggttgtgtgttggaagataggtaggtaggattgggatgagtgggtagggatgtgggttatgtttttggttgtggttgttagggggtgttgtgtttgtgggttgtgggtgtgggttgtgtttgtttgggtaggttggagtgggttgtgggaatgttttagggtttgggtattttaggtgaagtgggtttgagagaaatgtttatttgggaggttgtgtagtgggtggtttggggtattttgtttaatttgtagtggagttgttagtgatttttgaagtaagttattttttttgtttttgtaagtgggtaaatggaggtatgtgatataagtatgtgtagtaaagttgtggttgtgttgggaatgtagtttagatttttttatggttatttagtgttttttttgtttttgttatatagagttgtgggtggttttgtgtttattatataggggttatttggtttttgtatagatggagaggttggaggtaggtgggtataggaatgatggggaaagttttaggaggttttggaggaggagatggttaggttttattgtggtttgtagtgtgtatgaaaggtgaggttgtttggagatgtaataagtggattatagtgggtgtggtaaatatgtatttttttagtgtggtgttttttttgtgtagtttgagggtttggaggtgatggaaatttatttatgagtgttgggatgattgtagtttgtatatattagtttggtaattttgtgtaattttttttttgttatgtagttgaattagtattattgtgtagggagagtgtttatatttttattagtggaaagagaattttggtaaaaaagggtagttgattaagtggttttaattttattgggtatttttttggggtttttttatgttgattattttgtttttatttttgtatatgtttggataataggtttgttttttataaataaaaatttttttttttttttttttttttgatagttgaggtaagtgagtatttaaaaaagatattttaataattttaaaggaggatatgagaagatagggaaatataaatagtattagtaaaatggttggtttggggatttatttttgtttgtttgtttgttttagattggggttttgtttttttttaaatttgttaggatttttagttttttgttggtttttatgtggggtgtttttttttatgttttagatatatagatgatggtgtttttatgtttaaggttatagatagtaattttgtgtttattttgggtttgtttgtttttttgattgtgtttttttttttaggaaagtagagatgagtgtgttagagataatggaatattgttttttatattttttatatatagaataatttagttttttaggatagtttagtagtgtttattatagtagttattgtaggtataaaatagttattatttgtgttataatagggaagttgttttgtttttgtttttttttgtttttgtgttttattgattttattttattttttgaaataaaagtggttgaaagaatttttggttattatgggtgtttagataattaagattatgtttgtgttttttttgatgtggtattttatattgtggatgagttttagtgattttttttgttttaaattgtttattgttttaatttttattttttaaaaaggtagtattaattttttttttttttagataattagttaagttagggaatttttgaaggggaaggttagaattttgtgatttttgtaagaaggttattttgatttatagttatagtttaatattggggatattggtagatgttaggtttgtttatagtttagttttaatgaggttttaatgatgtgattgttgtattttggtttggtgagttgttgttttttatggtgtagtttgttattggataaggtgattttttttttttttttaaagataagtaatagttatattaatttagggtatttgaattagaattttgaaaggtaagaaattaagttttttttggattggaaatttgtttttgtataggagatttagttttttttatttagaggattagtaagtgttttttttttatttgatattttaaaaattgtattataatggttagaattttgtgttgtagaagtagtagttttaagttatagtgatagttagggatttatggaatttagaaggtgatatggttatatgtttttaatttttgttggaggttagtatgaaaggtgtttttttagtttgtttttgggaggttgtgattttttttagaggggggaaatattttggagaagtatgtatgtgttttttgtttttaagtgatttgagttgatatagtatattgattagatttagttaggtaagtagtggtttagaatagagttttaggtaaaaattaggtaagatttagtaatatagggtggagaatttgtttttgttattgttttttattaatagttttgttgttataggatttatatgatatgaaatttatttttttaaagtataaatttagtgtgtttttttttaatgtatttattgtattgtgtaattattattattatttagttttagaatatttttagtatttagggaatttgtgtttgaagttaagttataatattgttttaattggataattttatggagttttaaaataatattagttaatttattagttaattataaaaaggtagagatggaatatattattggtagaataagtgtttggtaagtttttatttagtaaaatttagtagaagaaatgatgtttattttaaaattgtggagtttttaatatttgggataaattgaaattgtttttagaaagtttttaaaaaaaaaattaatttttttattgtatatattggatttgagtttagttgaagagaatgggtgtttttttattagtgtgtttattgtttttaatttttttttttttagagttggga

SEQ ID NO: 698 - DNA, 6187 bp, Artificial Sequence
  chemically treated genomic DNA (Homo sapiens)
attattttttttagtttattttaatttttgagtggttttggtttttaattttatatttgattttgtgattgatatttttttattgatatggaaatggagataaattttagttttttatttttattttgggtttagtgttggttttttattttttatttattggttttaagttttaagaatttatgttattttaatttgagttttttttatggtttatttgatagtttttatattagtttttaagttttgttgttttttgtagatttatgttttgggggttatgttgttgtattttggattatatttttgttttatttaattttgagtttttttagagtttttggtagtggaagatagatttatttttagagggtgatagttttaagtggttagggtttgggtgggggagtttggaggaggtatttgatatagattaggggtttaggtaagtttttgggaggaggggatattgaggtagagtttagggttgaggaggaggaggagaaattttagtagatgttggggaagttgggttttagtggagaaaattatttttgtgaaatgttgggggttttttggttttgggtttttttttttttttttgttatttagagtaaaatggtaaggttgggatttgaattaatgtttgtttttaaggtttgtgtttttaatttttttgttgtttttatgtgaaattataagagttgtggagttggtgtttgggtgtggtttggtatgaggttggtttggtttgagtttgtgttgggtttttgaagttagttttggagtttggatttttttttatggttagtggggattaggaggggttgtaggttaaggggaatttggttaggtttgtatttagtgggtggagatgggtgtgtttggggatttatttttttggtgtttagtttagtttggtggggagaagttttaaggtttataagttggttatagatataagtgtagttttaatgtggtagtttattgaggggtttgtgtggtttttgtagggtgtttttgaatgttttgatttttttgtttttattgagaaagtgatagattttatttttaaagttgtttttggtatttggtgatagattagttggaggtgagtggtagttgtttttatgggtagggtattggtttttttgggttataggttgtatttgatttattttagttttatgttttgtttggttttgtggttatttgtatgtaggttttgtttttattaaggtgtttttaaaaatttagtttttgtttggtttgttagatgtgaggtttgtttgtgattgttttagtaggaggtagggtatttgaatttatatatggggttttgtggttagtattgttttggggttttataggtatttgtgtttgttgtttttgattgggttttaggttttttaggatttttttgattttttgttggtttttttttttttttttttgagagatatttttgttttgtttttttggttggagtgtagtggtgttattttggtttatgtaatttttgttttttgggtttaagtgatttttttgttttagttttttgtgtagttgggattataggtgtttattattatgtttatttaatttttgtatttttagtagagatgggtttttgttattttggttaggttggttttaaatttttgattttaggtgatttttagttttttgaggtgttgggattataggtgtgagttattgttttttgttttaatgttttgttttaatagtaaagtttggttttgtgtttattttgattttttggggtttttgggtaaggtttggttttaggtagatagttatggttaggagagatagggtagtggtagattatggattttgtgggattagtgttttttatatgttataggtaggtttttggttggaggatgtttggtagttttaggtagggtttgggttttgtgggattagtgttttttatatattagaggtaggtttttggttggaggatatttggtagttttgggtagggtttttgttagtagggtttatgtttttagtttattgtggtttttgtatagatattttatttattatgtggtttagtaaaagtttattgagtttttgttgtgtgttagatgttggtttaggtgttgagatggagtaggatttgaagtagataggaaaaaataatttttgtttagagtatgtattaggtagagttgggagtagatagatgtttgtgtgttttgtattagttgttgttaggtgttttaggtagaatgtaggtagggtaggggttggggagggtaggggttggtattttagatgatgggaggttagtagaagttttattgagaagttgagttttgagtaaagatttgaaggagtggagggagggagttatagggattttgagagttgatgttttaggtagagggagttgttagtggagaggttttgggtgtaggggggtgggggtgggggagatatttgtgtgtttggaaatggaatgggggtagagggggtttgtaggatatgatttagattatagagggtggggattgggtgatttgggatgtattggatgttttgtttggtttttatttgtatttgtatttgttatttggtttttgggatttttttgttttttattttgggattaggtttttttgattttttttgttttttattttttgttgtttatgggagtagagagtgtggttttggggttaaggaatattggtgtttatatgggaggaagtgttaggttaggttttggttttagtgttttgttatttgtagtttttggggttgattatggggtgggttaatttttgtttttttttttttaaattttttagggtaggattattttattagtgtgaggaataggagaaaaataaggggggtttttttagggttttattgagtttagggggtagtagtttggttatggtgattatttttttggtttttgtagttgtgtttttagggaggggaggggttgtattgtttatgttattgttattttatggtatttttttattgtgtttttgttttgtttttgtgtgtgttgtgttgttttgtttttgtgtgttggatgtatgttttgtgtgttttattttttgttgggtttttatttattattgtttgggattttagattattgtgtggggtagtaaaggtgttaaagatggggtttttatgttgttgttggatgagtttgagaatatgttggtgatatgttttaattttttgtggagagatagtttgttgttgtttgtttgtgtttgttaggaaaatgggatgttagaggagttggttattatggttagagggggtttagggaaggtaggtagttgaggttggtttgttggttatagtgaggtgggtggtggtagtggtgataggtgatgggtggggttagagaagaggtttaagttttttagggagggtttagggggtttttaggagtttttttgggataaatgttttttttttgggtttgatgttggtattttttagtttgttggtttggttagtggggtgaaattggtagttggttggttttttaatatttatttgagggttgatatggattatttattttggggtgtttaggtaatttattttttgttttagggtttttattgttttttgtttgttgtttttttgtttttattttttagttttgttttattattgtgtattttattttgattatttatgtgtttgttttattgttgggttttttttttgtttagggagtagagttgttttttggtatttattattgatagttattttttttttgttttagggggagttttatgatgtggtttttaatgggttattagtggggggtttggttattttttagtttttttttttttttttttggttttttatttgagtttgaggtgtttttagttttggagtgttgggattttatgttttagagttttagttggtttttttagtttgtatttttgttgtttttgttgtttttgggttttttggtttttgtttattatagtgggagttatagtgagtattttatgagtagttttgggttgttttgtagttggtggtggatttaggtgatttttgtttttatttggataattttattaagattggtgagggttttatgggtattgtgtgtattgttattgtgtgtagtttgggtaagttggtggttgttaagaagatggatttgtgtaagtagtagaggtgtgagttgttttttaatgaggtgtgggtgttgttgttttgttgttttgttggtttttttattttttttttttatttttttttttttttttttttttttttttgtatttttttgtgttgggttaggttttttttttttttttatttttttttttttttaggttgttttgtttgttttagttgggtttttgtttttgtttttatagtatttttatttatatttttgtttttgagttttagatttagggttttttgggttattgatttttgatttagtgttttttaggttttttgtatttattgaggtttgtttgggttttagggtatagtgttttttagatttgttttttttgggttttttgtgttttgttttggtttttatttttgggtgttttttggtatagtttatataattattaagagtatgtttttgatgtttaggtttattttttttttgtttttttttagagattttggtagtgttttgtagtattttgatgataggaagtttaggtttttttgttgggtgtgtgaggttttttttgattttgttgtttattatagtgttgggttgtattatggagttttttgtttgggttttttatttttttgttgatatatgtttttttttttatttttgtttttgtttgggttttagttttgtgattgaatgttttttttttatttgttttttagtattagtttaggattgatttgagatgggtgtgtgtttaggggggtgtgtttttagaagggaggtgtgggttttaagttggttttgaggtttatgtggttgtggtagtaggggagggtagtttaggtggttttagtgagtataagtttaatgtggaattgtagggggagttaggggggtggtggtggttgggtttggtattggtagtttttttgtttttttttattattgatttagtttttgtataggtggtaattatgagggattattagtatgagaatgtggtggagatgtataatagttatttggtgggggatgagttttgggtggttatggagtttttggaaggaggtgtttttattgatattgttatttatattaggtatttttggggttttagattttttttgtgatatgattaagttttttttagattattaggggtggggttatatttttaaattagttgtgttttgggtttttgggatggggttgtgttttttattttttttattttagagtggggttgagtggttttagattttttttattgtaaggtagggttgtgttttttttggtattttggggtgttgtttagttggttgtttattttttattttattttgtaggatgaatgaggagtagattgtggttgtgtgttttgtagtgttgtaggttttgttggtgttttatgtttagggtgttatttattgggatattaagagtgatttgattttgttgatttatgatggtagggtgaggggatgggtggtggggtatgggggtggtaggtttttggttgtggggtttttttgtttttttttattttttgtgagggtaggtgagttttgatttttaggtttgtgttttgaggagttgggaattttgtttttttttggtggagtagtttagagttaggttttagtttagtggggattttgtgtagtgggagggtataggttggtgggggttttgttattagtataggatattgggtttaggggtagggatttgggtagatagtgtagtttttgttataggtttttttttttattgaaaagttgttttttgtttagtatttagggtggtttatggattttagttttgttttttatgttttggattgaggttttaaatttgaggttgtgataattataatgttgggtggatatgattttttgtgagagagggtttttgatttgaatgaaatgtttgtagaagtggatgattttatttttttttttaaggaagattaagttatattattagtttaggtag

SEQ ID NO: 699 - DNA, 6187 bp, Artificial Sequence
  chemically treated genomic DNA (Homo sapiens)
ttgtttggattaatggtgtggtttaattttttttgggggaggggatggagttatttatttttgtaagtattttatttaagttaagggtttttttttatagaaaattatgtttatttgatgttataattgttatagttttagatttggaattttagtttaaagtatggaagataggattggggtttatggattgttttgggtgttgggtagggagtagttttttagtggaggaagaagtttgtggtgggggttgtgttgtttgtttagatttttgtttttgggtttagtgttttgtgttgatggtagagtttttgttagtttgtgtttttttattgtatagagtttttattgagttggaatttgattttgggttgttttattagggagggatgaagtttttagttttttaagatatagatttgggggttagagtttatttatttttataggggatgggaagaggtagggaagttttgtagttggaaatttgttgtttttgtattttgttgtttgtttttttattttgttattatgggttagtaggattgagttgtttttgatgttttggtggatgatgttttgggtgtggagtattgatagggtttgtagtattgtaaggtatatggttgtgatttgttttttgtttattttgtggggtggggtggggggtgagtagttagttggatagtattttggggtgttgagggggatgtagttttgttttgtagtgggaggaatttgagattatttgattttattttggagtgggaggaatggaagatatgattttattttaggggtttggagtatagttggtttggagatgtggttttatttttagtggtttggaggggatttggttgtgttataggaggggtttgaggttttagaaatatttggtgtgggtgatgatgttggtgagggtgtttttttttaggaattttatgattatttagagtttgttttttattaggtagttgttgtatatttttattatatttttgtgttggtagttttttatgattattatttgtgtaggggttgggttagtggtggagggaggtgggagggttgttagtgttagatttagttattgttatttttttggttttttttgtagttttatattaagtttgtgtttattggggttatttggattgtttttttttattgttatagttatgtgggttttagagttagtttgaagtttatgttttttttttgggggtgtgtttttttgggtatatgtttattttaggttagttttgggttagtgttggggggtaggtgggaagagagtgtttaattatagggttgagatttggataagggtaaggatgagagaagaggtgtgtgttggtgggaggatgaggaatttaggtgaggagttttatggtgtagtttggtattgtgatgggtaatggggttgagaggggttttatatatttggtaaagggatttgggttttttattgttagggtgttatggggtattgttagggtttttaaggagggatggggagggggtgggtttgaatgttagaaatatatttttggtggttgtgtgggttgtgttgagggatatttaggagtggaggttagggtggggtatagggaatttaggaggggtaggtttggaggatattgtattttggagtttaggtgggttttagtgggtgtgaggggtttggaagatattgggttgggggttagtggtttgaggaattttgggtttggggtttagggatagagatgtgggtgagggtgttgtgaggatagaggtagggatttagttggggtggatgagatggtttggggagggagaagagtgaggggaggaggggagtttggtttagtatggaggagtgtagggagaggagggaggaggggagggagggtgggagggaggggtgggaggattagtagggtggtagggtagtagtgtttgtattttgttgaagagtagtttgtgtttttgttgtttgtgtaggtttatttttttgatggttattagtttgtttgagttgtgtatggtggtgatgtatatgatgtttgtggagtttttgttaattttgatgaagttgtttaggtaggagtgggggttgtttgggtttattattagttgtagggtagtttggaattgtttatgggatatttgttgtggtttttgttgtggtgagtgggggttagggggtttaggaatagtaggggtggtgggggtgtaggttggaggggttagttggggttttgaggtgtggggttttagtattttagggttgggggtattttgggtttgggtgggaggttgggaggaggaggaggaggattgggggatggttaggttttttgttgatggtttgttaggggttatgttatgaggttttttttgaaatagaagagaggtagttgttagtgatgggtgttagggagtagttttgttttttaagtaggagagagatttagtgatgggatagatatatgggtggttaggatgagatgtatggtggtggggtggggttggaaggtggggatagaggagtaatgggtaggggatagtgggggttttggggtgggggatgggttatttgggtattttgggatgggtggtttgtgttagtttttgggtaggtgttaaagggttggttagttgttagttttgttttattggttagattagtaggttggggggtgttgatattaggtttggagagggggtgtttgttttgggaggatttttggggattttttgagttttttttggaagatttgggttttttttttggttttgtttgttgtttgttattattgttgttatttgttttgttgtgattggtgaattggttttggttgtttgttttttttgggttttttttggttgtggtggttggtttttttggtattttatttttttggtgggtatgggtgggtggtggtgggttgtttttttgtagggagttggagtgtgttattgatatgtttttaaatttgtttagtagtagtgtgagggttttatttttggtatttttgttgttttgtatgatggtttggggttttaggtaatggtgggtgggggtttagtaaggagtggggtatataggatgtgtatttgatatgtagggataggatagtatgatatatatagagataagatagagatgtaatgaagagatgttatggagtgataatggtatgggtagtgtagttttttttttttttggggatatagttgtaggggttagaggagtgattgttatggttaggttgttgttttttgggtttggtgggattttggagaggttttttttgttttttttttgttttttatattggtggaatagttttgttttgaggggtttgggggaggaagggtagaaattgatttattttataattagttttgagggttgtaaatgatagggtgttggggttagggtttggtttggtatttttttttatgtgggtgttagtgttttttagttttaaaattatattttttgtttttatgaataataaggagtgggggatagggagagttagaaaggtttggttttaaagtagagggtaagggggttttaggagttgggtggtaaatgtaaatgtagatggggattaggtagagtatttagtgtattttgagttatttggtttttattttttgtggtttgagttgtgttttgtaggttttttttgtttttgttttatttttagatatatgggtgttttttttatttttgtttttttgtgtttagggtttttttgttggtggttttttttgtttggaatattagtttttagggtttttgtggttttttttttttatttttttaggtttttgtttaaaatttagttttttagtgaggtttttgttggttttttattatttaaaatgttagtttttgttttttttggtttttgttttgtttgtattttatttagagtatttaatagtagttgatatagagtatataggtatttgtttgtttttggttttgtttagtgtatgttttgggtagggattgtttttttttgtttgttttgggttttgttttattttagtatttagattagtatttggtgtatagtaggggtttagtgaatttttgttaaattatgtagtgagtgaggtgtttgtgtaaaggttatagtgagttgagaatgtgggttttgttgataaggattttgtttggggttgttagatgttttttagttggaggtttgtttttaatgtgtggaaaatattgattttatgaaatttggattttgtttggggttgttaggtattttttagttagaggtttgtttgtaatgtgtagaaaatattgattttataaaatttgtggtttgttgttgttttgttttttttggttgtggttgtttgtttgaagttgggttttgtttaggggttttaggaagttaaggtggatataaggttagattttgttgttagaatagggtgttgaggtaagaagtagtggtttatgtttataattttagtattttgggaggttgaggattatttgaggttaggagtttgagattagtttggttaaaatggtgaaaatttgtttttattaaaaatataaaaattagatgggtatagtggtgggtgtttgtaattttagttatgtgggaggttgaggtaggaaaattgtttgaatttaggaggtgaaggttgtatgagttgaggtggtgttattgtattttagttagggagatagagtaggaatgttttttaaaaaaaaaaaaaaaaaaattaatagggagttgagaaggttttgggaggtttgaggtttggttaagggtagtaaatataagtgtttatggggttttaggatagtgttggttataaggttttatgtgtgaatttaagtgttttgttttttgttgggatagttataggtaggttttatatttggtaagttaggtaggggttgggtttttggagatattttggtgggggtaaagtttatatgtaagtggttatagagttaggtagggtgtggagttgaggtgggttgggtgtggtttgtggtttagaagagttagtgttttgtttgtggaggtagttgttatttgtttttagttggtttgttattagatgttagaaatggttttggaagtgaagtttgttatttttttagtggaggtaaagaagttaaagtatttaaaagtattttgtaaggattatatggattttttagtgggttattatattgaggttgtatttgtgtttatggttaatttgtgggttttggggtttttttttgttaggttgggttgggtattgggagggtgagtttttaggtatatttatttttatttgttggatgtaaatttggttgagttttttttggtttgtggttttttttggtttttattgattatgggagagagtttaggttttaaggttggttttagaggtttagtatgggtttaggttaggttagttttatgttaggttatatttagatattggttttataatttttatgattttatatggaggtagtagaggggttaagagtatgggttttggaaatagatattggtttaaattttaattttgttattttgttttagatggtaggaagaaaaaaaaaaatttaaaattaaaaagtttttagtgttttataggagtgattttttttattaaagtttggtttttttagtatttgttggaattttttttttttttttttagttttgggttttgttttggtgttttttttttttagaagtttgtttggatttttggtttgtgttaggtgttttttttgggtttttttatttaagttttgattatttggggttgttattttttgggaatgggtttgttttttattgttaggagttttggaaaggtttaaggttgggtgagataggagtgtggtttggggtatagtagtatggtttttgggatatgagtttgtgggagatagtagagtttggaggttggtgtgggggttgttagatgggttgtgggggaggtttaggttggggtggtatgggtttttaggatttggagttagtgggtggagggtgaaaggttagtattggatttaggataggggtggaaggttggggtttgtttttatttttatgttagtgaggaggtgttggttatagggttgagtgtggggttgagggttagggttatttgggggttggggtgggttgggggaggtggt

SEQ ID NO: 700 - DNA, 6233 bp, Artificial Sequence
  chemically treated genomic DNA (Homo sapiens)
ttggtttgtagggggtgaggtaggggtatggagtttttggatggatttttattgatttgggggtttttattttatttatttttttagtggttggtttattgttaataattaattttttttattttttttttttttttttttttgagatagggttttagttatttatgttggagtgtagtggtgtagttttagtttattgtagtttttattttttaggtttaagggatttttttgttttagttttttaagtagttgggattataggtgtttattattatgtttggttaattttgtatttttggtagagatgggtttttgttatgttgtttgggtttgttttaaatttttgagtttaagtgatttttttattatggttttttaaagtgttgggattttaagtgtgagttttatgtttgggttttttatttttttttgtggtgtttaggtgaaatttgttttgttttttatttttagggtagtatggtttttggatttttaattgtttagttgtgtttattagtttttttgttggatttgtttttatgtgttttttaagtatttaatgttttatttttatttgttttatttttattttagggattttttttatatttaggattggttttgtttataggttttttttttttaggttaatgtttagttttggtttttgtttgttttagataggattttttatttagaatttaaattgtttagttgtttgtttatgagatattttggaaggtttttggatatattttttttttattagtattgttttggattggttatttttagttggaggattttgttagagtagattttttagtgtttttttatagtagtttttggagtttttgaaaggaaaagtgattttttggttttttatttgtagagtttgtgttttatttgaagttgtattttgtattttttttgtgttaattttgttgatattttttgtttaggggttttaggtttgtagagatttttttttattttgtttgttaaatatggagtgttttagatttgtgtattttgaggatgatgtggttgattttagagtttgtaggtgtgtataggattttggggttgttggttatgaggtgtatgaggaggtttaggttttgttgttttttgtttgtgaagtttagggagtttatgttgttttgttgtagtgttttgggtttaatggtgttggggtaggggatagggggttgggttaggttgttagggggtagggttgtgagagtgggaggggtattgggatggggtaggattttggggtatagggtagggtgttaaatgagatttttagagttagagtttagatttagggtttatgttttgtttttggttgttttttttatttttatttttttgttgtttatttattggttgttgttatataagatgggttgtaggttggtttagagttgtatgaaggttgagtattggttttgtagtgtgtttggggtggttagtgttgtagtagagggtgtgttttttttagtggtggtgttggggtttatgattgtttttgttttagtgttattggttgttttatttgtattattggttgggggtttgggggtttggttagtgtaggtattttggggtagtagtagggttagggttgataggatatttatattttgtagaattttttgggtatttagtaggttttttagaagtgtttgtagtttttgtgggggtggtgtttgtggtgaggagtttgagttgttgggggtatttaggtttagttgaggggaaataggtatgtgggtagtgtggggtgagatggattgtaggtgggtgataggttaggagtggagtagggagatagtagtagggagatataagttaggggtgttgggagggagtttgtagtttgggtaatgggagtttaggataggagttgggatggtgagtaggagtggggtattagttatggtgttattggatatttatttataggtagtattttatgtatagtttgggtttaggagttttgagttttttaagtggttttagttttttttttaatttaggtagtaagtagtgtagtgggtagtgggtaggtagggttttatttgttgggagattttggttatgtttagttggttttggagtttagtagatagtttagagaagtgtttggtatgtgtagtagtttgtttattgtagatagtattttggtagttttgtagggtttttttttgatttttaggtatagtgaggatttggtttagtttttttgagtttggtgtgtaggtgagttgttttaggagggtaggagttagtagtagtttttgggatgggtataggggtttgtggagttatggtaaggattttgtttttaattattagggttttaggttttattttgttttatttattggttggttttggggttgtttgggttttatgatatgtttttattttttatgtttgttatagatttttgggatttttttttttttttaggaggagttttaagttattaaaggggttttttttttatttatggagtagaagtatttttagaggtaggtagtattttaggtttattttatatatggatgtttttatttttatttggaataggggattgttttttaggtggttttagggtttttgatttttgtggaggttagattgtgaatttagggtagatgagggattaaagagtaggtggtagatttaggaggtgtgggggaatggtttagatggggtgtggggggtgtggtttagatggtgggggtgtggttttgatggatgtgtgggggtgtggtttagatggtgggggtgtggtttagagagtgggggtgtggtttagatggtgggggtgtggttttgatgtaggtgtgggggtgtggtttagatggtgggggtatggtttagagagtgggggtgtggtttagatggtgggggtaaggtttagatggtttgggtgtgatttaggttgagtattttgaggatggtttagtaattagggggtgtggttggggtagaagggagtggttagggttgggagttgtttttgttttattttgggtgggtttatatgggtggttaagagtgtttgggttgtgttattgggtagtgataagttttgtgttaggaaatgttagagtttttgtgggtttttggttattgagtttagagagaaggaagatattggataggtaggaaggtgaggttgagaggttgttgtattttggtaaggtgtttttatatgtgtttggagttgagtttaatattatagttttgttattgtagtttgtgtgtggttgggaatttagtgtaggtggaggggtttagagtggatgtgggttttagtttagtgatagtagagttttgtttgtagttttgttttttaatttttttgtatagggtatatttgtggatttgtttaggtggttttttgaggtgtttgggtttgtattgagggtttttagatgttggtgtagggttttgagttttgagtttaggttgggttgtgttgggttaaataggttgtttttttttattatgtggtttaggtgtttaagtagttgtgtgattttgtattatggtggatgttatttattggatgggttggggaggggtgggtgttttgaggggtgggtgggtatttatgtggagttggtgtattgtaggaagttgaatttgttttgttggttgtttgggtatagtgattgtatgataggtaggatgttggtagatgttaggggtgttgttgtgtagaaggttggtagatttatgggagagggtagggttgggggtgaaaggggagagagagagagaggaatttagaaggggagggagatagaggttgagaggagaaatttagagaaagttaggaaggagaagtagtgttagggagaaggtggtatagagttttggttttagttgggttataggttaagtgttttggggtgaatgattttagtaggttagaggttaaagagttatttattattttttttgttataatttttagagtatttttttttttttagttagtgtaggtttatatgttttggtattttttttttgaaaatgttttaggtgtggtattgtttatagagtttaggggaggataaaggattttttttgggtagtgatttttgatttttggttagttggttagtagagtgagtgtaagagtttgaaggagtatgaagggagagtagttaggttgttttagttttagtttaggttagtttagttttagtttagatttagtttagaagttgaggtattttagttttagaaggtaaggttaggtagagagatgttgttttagtttgatttaggtattagttgtgtttttaggtggttgggttttttattttttattattttttattttattgtttgttattttttatttggagttagttgtttttgaggttggtagggggtttgggagggttgttaatgtaagtggggagggtgtttaagttaggatggtttatgggttttttgtagttgttgtttaggttagttaggaggaggtggttgtttatttatagattgtatgttagttgaggataagagattatgtggggagggagggggattaaaatagaatagaggagattagtgagtgtttatattattaggaagaggtgttggtattattatttgtggttataggttagttttgatttttatagtttagttaggaggtatggtttaggattatataggggagtaggtattgtattttagggattttgggagtaggatatttgtgtgtagatgtgtatatatagtgtaggtgtgtgaggtgttgtgtttttttggttgtgtttggggttttttgttgtatttatttttttttatggagatggtgggttttttttgttgtagttttagtaggataaagaatagtattagggggatgaagattttgaaggttaggatttattggaaagggtgggtttagtgagggataggatagatttgtgtttgtttaggttttttttagttttttatagggttggtttagtttagataggattatgtgttttttggggttagggaaggtgggtataggttttttggaattattgaaggtttgagttttttttagggtattgagggtaaggattgtttggtttagtaaattaggttttttgtttttagtttatattgggtttatgtgttttttgaggagttttagggtttatagggataaattggttagtttgtggtttattttgatttatgtatattttagtttattttttttttttttatttttagggttatttgggtaaaattttggggattatttgagttattagttttgtttatattttttatattgttttgggtttattttttttttattttttttttattaatattggggtttggggagatgaggaggtttggttgagaggtttggtttgtgtttagggttttgagttttggagaagatttggtaaggggtttaatagttttagtttttgaagtaaaggtatttttttttttttttttttttgagatggagttttattttgttatttaggttggagtatagtggtgtgattttagtttattgtaagttttgttttttaagtttatattatttttttgttttagttttttgagtagttgggattataggtgtttgttattatgtttagttaattttttgtatttttagtagagatggggttttattgtgttagttaggatggtgttgattttttgattttgtgatttgtttatttgggtgtgagttattatatttggtttaaaggtatttttttttgttttgtttttttttttgatttggggtagttagttttgggttttggagtttagtttttttaggttggtttttgttaatttaggttgggtattaaggtgagttttagtgggatttgtgtggagtgagaaagaggtgttttgtttattttatttgaaaattaaggattttattggtttttgtgttttagtttttagtttagggaggaggaggagtttgagttagttattttttagagagtttttggtagattagttttttttgagatttataggatagaggggttttgttttttttagtttgagggtgagtatttagtttggaggtattttttgtttttatttttattttaaaattttttagagtttttagtgtgttgtgtggtttgggttgagtttttggtttttggggtgggggtggttgttgtgtttattgtgtttggataata

SEQ ID NO: 701 - DNA, 6233 bp, Artificial Sequence
  chemically treated genomic DNA (Homo sapiens)
tattgtttaagtatagtaaatatagtagttgtttttattttagggattggggatttggtttgggttatatagtatattgggggttttgaagggttttgggatggggatgaggataaaggatgtttttgagttgggtgtttgtttttgggttagggagggtagggtttttttgttttgtgggttttagagagggttggtttgttgagggttttttggagggtagttggtttaagtttttttttttttttgagttgggggttgggatataagaattggtaaagtttttggtttttaggtgaagtgagtaaagtattttttttttattttatgtaggttttattagggtttattttggtgtttagtttgggttagtaggagttgatttggggaaattgagttttaaggtttaagattggttgttttgggttaggagaggggatagggtagaaagaggtgtttttgggttaggtgtggtggtttatgtttaggtgggtggattatgaggttaggagattgatattattttggttaatatggtgaaattttgtttttattaaaaatataaaaaattagttgggtatggtggtgggtgtttgtagttttagttatttgagaggttgaggtaagagaatggtgtgaatttgggggatggagtttgtagtgagttgagattgtattattgtgttttagtttgggtgatagagtgagattttgttttaaaaaaaaaaaaaaaaaaaggtgtttttgttttagggattggggttgttagattttttattaggttttttttgaggtttagggttttgggtgtaggttaagttttttaattaggtttttttatttttttaggttttggtattggtggggaggaagtgggaggaaggtgaatttggggtagtgtgggaagtgtaggtggggttagtggtttagatggtttttaagattttgtttaggtagttttggaggtggggagggagaagatgagttgggatatatatgggttagagtagattataagttggttgatttgtttttgtaggttttgaggttttttagagggtatgtaggtttagtgtgggttggggatgggaaatttgatttgttgagttagataatttttatttttagtgttttggaaggggtttagatttttagtggttttgaagggtttgtgtttattttttttggttttagggagtatgtggttttgtttgggttgggttagttttatgggaggttggggagggtttaggtgagtataggtttgttttattttttattgggtttattttttttagtgggttttggtttttgagatttttatttttttggtgttgttttttattttgttggggttgtgatagaagaagtttattatttttgtgaaggaaggtgagtgtggtaggaggttttaggtatagttgggggagtgtggtattttgtatgtttgtgttgtgtgtgtatatttgtatatgggtgttttgtttttggagtttttgaggtgtggtgtttgtttttttgtgtggttttgggttgtgttttttggttgggttgtggaggttggggttggtttgtggttgtgaatgatgatgttaatgtttttttttggtgatgtgggtatttattggttttttttgttttgttttgatttttttttttttttgtatggttttttgtttttggttggtatgtagtttgtaagtgagtggttatttttttttggttggtttgggtagtagttgtggggggtttatgggttgttttggtttgagtgttttttttgtttgtattaatagtttttttgggttttttgttggttttaggaatagttggttttagatggggggtggtaggtagtgaagtgggaggtggtagggagtgaaaggtttggttatttaaaggtatagttggtgtttgggttaagttgaggtggtatttttttgtttggttttgttttttagggttggggtgttttggtttttgggttgagtttgggttgaggttgggttggtttgggttggggttggagtggtttggttattttttttttatatttttttaggtttttgtatttattttgttaattagttggttagaggttagaggttattgtttagagggggttttttgtttttttttgggttttgtaggtagtgttatatttgaaatgtttttggggggagagtgttagggtatgtgggtttgtattggttgaaaggaaaggaatgttttgggagttatggtagaaggggtggtgagtggttttttgatttttgatttgttggagttatttgttttagaatgtttggtttgtagtttagttggggttagggttttgtgttgttttttttttaatgttgttttttttttttgattttttttaaatttttttttttggtttttgtttttttttttttttggatttttttttttttttttttttttttatttttgattttgtttttttttgtgggtttgttagttttttatatagtggtgtttttgatgtttgttggtattttgtttgttatgtaattgttgtgtttggatggttagtgagatgagtttggttttttgtagtatgttaattttatgtgagtgtttatttgttttttggagtatttatttttttttagtttatttagtgagtgatatttgttatggtgtagggttatgtagttgtttgagtgtttggattgtgtggtggaggaaggtaatttgtttgatttagtgtggtttagtttgggtttagagtttgaggttttatgttagtatttggaggtttttagtgtgggtttgggtattttggggagttatttggatagatttataggtgtgttttgtgtagggaagttggggggtagggttgtgggtaaagttttgttgttattgggttgaagtttatatttattttgggtttttttatttgtattgagtttttagttatgtataggttgtagtggtagagttgtggtgttgggtttggttttgagtgtatgtgggggtattttgttaaggtgtagtggttttttagttttgtttttttgtttgtttagtgttttttttttttttggatttggtggttagaaatttgtaggagttttggtgttttttgatgtaaaatttgttgttgtttaatagtatggtttaagtatttttggttgtttgtgtggatttgtttgaggtaaggtagggatagtttttagttttggttatttttttttgttttagttatgttttttggttgttgagttatttttaggatgtttagtttgagttatgtttagattgtttgaattttgtttttattatttgagttatgtttttattttttgagttatgtttttattatttgagttatgtttttatatttatattggagttatgtttttattatttgagttatgtttttattttttgagttatgtttttattatttaagttatgtttttatatgtttattggagttatgtttttattatttgagttatgttttttatattttatttgagttatttttttatattttttaggtttattatttgttttttggttttttatttgttttggatttatagtttggtttttataagggttaggagttttggagttgtttagggggtaattttttgttttggatggaggtgagggtatttatgtgtgggatgggtttggagtgttgtttgtttttgggggtgtttttgttttgtgggtgaggaaagggtttttttggtgatttggagttttttttgggagagggggagggttttaggggtttatggtaggtatgaggggtagaggtatgttgtgggatttaggtagttttagagttagttagtgggtggggtagggtgaggtttgaggttttagtggttggggataaagtttttgttgtggttttatggatttttgtgtttattttaggagttgttgttggtttttgtttttttggagtagtttatttgtatgttgggtttgggggagttgggttggatttttattgtgtttgagagttagaagggagttttgtagggttattgggatgttgtttgtagtgggtaggttgttgtgtgtgttaggtgtttttttgggttgtttgttgagttttggaattagttggatgtggttaaggttttttagtaggtgaggttttgtttgtttattgtttgttgtgttgtttgttgtttgagttgaaggaggggttgggattgtttggagagtttagggtttttgggtttaggttgtgtgtgggatgttgtttgtgggtgggtatttaatggtattatggttggtgttttatttttgtttattattttagtttttgttttgggtttttgttatttaggttgtagatttttttttagtatttttagtttgtgtttttttgttgttgtttttttgttttatttttgatttattatttatttgtagtttattttattttgtattgtttatgtgtttgtttttttttagttgggtttggatgtttttaatggtttggattttttgttataggtgttatttttatggaggttgtaggtgtttttgggggatttgttggatgtttagaaggttttgtaggatgtggatgttttgttggttttggttttgttattgttttagggtgtttgtattggttggatttttggatttttagttagtggtgtgggtggggtggttaatggtattggggtaggggtagttatgggttttaatgttattgttgaggagggtgtattttttgttgtagtattggttattttggatatgttgtagggttagtgtttagtttttgtatagttttgggttggtttgtagtttattttgtgtggtaataattggtaggtgggtggtaggggaatgggggtgaggaggatagttaggggtagggtgtgagttttgaatttaggttttggttttggaggttttatttggtgttttgttttgtgttttgaagttttgttttattttgatgttttttttatttttgtggttttgttttttaatggtttggtttggttttttgttttttattttagtattattgaatttgaggtgttgtggtggggtaatatgagttttttgggttttatgagtaaggagtagtggaatttgggtttttttgtgtattttatgattagtaattttaaaattttgtatgtgtttgtgggttttgaggttgattgtgttatttttaaggtgtatgggtttgggatgttttatgtttgataggtagagtgggagggggtttttgtaggtttgggatttttgggtagagggtgttggtagaattgatatgggaggggtatggggtgtagttttggatgggatataggttttgtaggtgggggattagggggttgtttttttttttgggagttttaggggttgttgtgggaaggtattggagagtttgttttggtagggttttttggttgggggtggttggtttagggtagtgttggtggaggaggggtgtgtttagagattttttagagtgttttgtgggtgggtagttgggtagtttgggttttgggtgaggggttttgtttggaataagtagaggttagggttggatattggtttgggaggggagggtttgtggatgaggttaattttgggtgtagagggggtttttaggatgagggtgggatagatgagggtggagtattgggtgtttaagggatatatggagataggtttagtaaaggagttggtgggtatagttgggtagttgggggtttggaggttgtgttgttttgggagtggagggtaaagtaggttttatttgagtgttgtagaaaggagtggagagtttgggtgtgggatttatgtttgaaattttagtattttgggaagttatggtgggaggattgtttgagtttaggagtttgagataagtttgagtaatatagtggaagtttgtttttattaaaaatataaaattagttaggtgtggtggtgggtatttgtaattttagttatttggagggttgaggtgggaggattttttgagtttgggaggtggaggttgtagtgagttgggattgtattattgtattttagtgtgggtgattgagattttgttttaggaaaaaaaaaaaaaaaaaggtggggagggttagttgttggtaatggattagttattggggaggtgagtggggtgagagtttttaagttggtgggggtttgtttagaaattttatgtttttgttttattttttgtaggttaa

SEQ ID NO: 702 - DNA, 6233 bp, Artificial Sequence; identical to SEQ ID NO: 700
  chemically treated genomic DNA (Homo sapiens)

SEQ ID NO: 703 - DNA, 6233 bp, Artificial Sequence; identical to SEQ ID NO: 701
  chemically treated genomic DNA (Homo sapiens)

SEQ ID NO: 704 - DNA, 6205 bp, Artificial Sequence
  chemically treated genomic DNA (Homo sapiens)
aaaatgaagaaaatgttgtaattttaagggtagagtttgtggatgaattttaatatatttatagatgtgtaatattttatttagatagagattgttgttttaaaattatgattatgattgtttttagagtgatattttttgtttttattttttttttattggtatatagtttatttatgaaatgggaattatgttgggtgaaggtttatgtgttatatttgagaagattttagttgggagggttgtttttggaattttaaggaggttgtgtaaagttataggagagaaagttatatttgttttttttttaggtgtggatttttgtttattagtgggtatagttttttttttgttttatatttgagagatataatatatgttttagtggtttgtgtattattgtgagtggttttgtgtattagtaaagaggggagatgtggtttgaaaaagttgtttaggttattttattgtttatttttatagtaggtgaggtgtaaggtttattgatttattttattttttttattttgaaatatgattttttgttagattttttatgtgtttaatgggatttatattggttattttttatttgttgagtgttttattagatgtgttttttatttttttttgttattttttgtgttttgggaggttaattttagtggattatattgattagtagttttttgttatttggttagagaaggaggtaggaggtgggagagatggtttggtattttttgattttaattttttttttttttttagtaggttatttttggtagtggttttttttttttatttgttggatggttttttttttatggttttaagtttattaggttttaataatatgattgttttttttttttaattttagggatggttattattttttgttgttattaggttttaggtgttttaagtttttttttaattttgtttatatttttataaggaatttttttattaaagtattattttttgaattatttgggttaaagtttgttttttgatggatttatgattgatttataggtttttggataaaaatggtaatatttgtatatttaatagttattgattataagatatatttggtttttagaaatgttataatattattaaaaagtatggtttattataaagaaatgatggtaggtttatttaggtatgatggatatagaggatagtgtattattaagagatgtaagttgggtatagtggtttatgtttgtaaatttagtaatttgggaggttaaggtgggttgattatttgaggttaggagtttgagattagtttggttaatatggtgaaattttatttttataaaaaatataaaaattagttgggtgtagtgatgtgtgtttgtaattttagttatttgggaggttaaggtaggagaattatttgaatttgggaggtagaggttgtagtgggttgagattatgatattgtattttagtttgggagatagaggaagatattgtttttaaaaaaaaaaaaaaaaaaaaaaaaaaaaaaaaaaaaaaaaagatggagtttgtttttaaatttataaggttggaagtatggtaaatagtaaagtgttgggtttaaagttaggtgagatggttttgaatttaggttttgatatttatagttggaaaattttgagtaggttgttgtgatattttgtattttggttttttttttggtaatttagagttattttgttgtttatattttttttagagatgttatgtgtaaggataaatgaggtgatgtgtgtgaaagggttttatgtatttggtgttgagatgtgtgggttagtatagttttgagggggtagttattttgggattttttattttttaggggttaaatattggttaggatggataaataaggagattggtaaaagtaaggtaagagaggttttagagatttagagaggtaatgagaagatagtttatttatttttttttttttagtttatttatttttttttttttattttagttttttttttttttttttttttttttatttgatatggttttttttttaagttgagggatgttgttgaggttatttgtttagtggagaattaaggtgtatttttaagtgtaggataaagttatgtattagataaagattatgttttttaagattagtaagagagagataaagatattttaataggaggtaggttatgttatgttttggggaaaaagaagagtttggtgttggagaattttagttgtatttttaatagattattaatttattaattagtttttttggataagttatttaattttattgtttttttttgtaattagggaataatatttatttttagtgtttgttgtgagaattttatagaataagttttgtatttagtatggtgtttggttttgattttagtatttaataaagggttatttttatttttagtattttagggagttagaggattttttttaattggatgattttggaatgattttttaaggagagggtatttggagattgaattttttgtatggtaggtatagtttgttgaggtatttgtttaattgggggaggttagttttgtagtagtattagggtatagtgttgtgtgtttggtgttggggggattgaaagggggtgagtgggttgtggaatgtaagttttttggtgggtagagggagttagtatgagttttggagtaggagagggttgggattaaagtgttttgaggtaggttagggtgtattaaagggaggttagtgaattgtattagtatagattttgtgatgttttgtagatgtttttaggttgttgggttttatgggaatttataagaaaggaaaggattggggagttggtagggtgagggtgggtgagggtgtgagggtgtgtttgtttgtgtgtttttggtggtgtttggttggggttgggtgtgtttgggattgtggaggttgtggaggaagtttttgtttttttttttttgtttttttttttttgtgttattggaaggattgtgtgggagagatttagaagtatttggatttttgattgttaggtgggggagggtggggtagtttttattgtttaaaggaaaattaaaagtgtgtttgtttgtgttgttttgatatgtggttgttattgggagggtttaggtagggtgttttggttgtgtttttttttgtagtttttaagatttggttagggtggtttgaggtttgtgtggtgtggggaggggttgagaattgagtgggaaaatgttatgattttttttgtgttttttttgtttttatttttatttttagttttttgagttttgttgttgttgttggggaaggattgatttgttttgtgttaaaggattgtatttatttagttttgttgggagaggtgtgtaaatatttaggtaagttaggatgtagggatggggagggggaagaaaaaagtaaagtatttatggttggtgtgtgtgtttgtttgttttatattttttttttgggtttgtggagttggggattttgtttagtgggtagtagtggaggtgtgaggagtttggttggttttgttttgttgtgtatgtgtgtgtgtttttggggatagtgtttaggatagaatgtgttttatagttgtaaataatgattttgagtattgtttgggattattgtattttggggtttttggggtggttagatgttgttagttgttttggaaatgttagtgttttatatagagttttaggaaagttttgtgtttttggttttatttttttttgttattaatatttttattttgtagataaggaaattgaggatagaagttgtgtgatggtgtatagtgagttgttagtaatggatttttaatattttttaatattgggtttttataaggattttgtggggtatagatggttggtgttatttaagaattgggtaaattgaggttaatatagattttggattaaaatttaagttttttgatttttgttatagtatttttttatttatatatattattattttagtggaaggattggagttttagagtagagaagggtttaaggttatgtttttaaatttttttattttataggaggaaattgaggtttagagaggttaaggaatttgtttaagattttatagtttgtaaatagtgtagttgggtgtttttgttttaaggtttgtgttttgtattttgtgttgtgttttttttagttttgtttagtgagggaggaggatttaaatgtttggtaatttgtgttttgaattttgttttaaaatagttgaagatgataatgttggggtatatttttttgttggttttttttttttttttttaatttgtaatagtttggagtttgtttataaatgtttgattatttttattagatgtgttttaattgtttggtgtatagggtggttggaatgttttgattggttaattttatttttaaggttatttttaatgaattaattgtaggattgaaaatatgaaaaataaaaaataaaaagggaattggtaggtagattgttatggagggaaaaataggtaggttagttttgtttggtgttgtgttttgttaatatttggttgtagggtggtgtgggtattttgtgtgtttggggtgtttgttgtatttggtggtgttgtggagggtgtttatgattgtgtgtagttgtgttttttttgtgagtggttttgtgtgtttggtttttggttttttggtggtgttgtattgaattgtttgttttgttgttagggttgtgattattttttaaaatttggaggtgagatttgtgtggttgtttttggggttttgttttgagtttttttttagggtgggggagaggttgtagtgtatttgggagtgggtgagggaatttttttttttttatgttatttgaaagtgaggaaatttgtatttgtgttttttaatgtaaatgattatttttggtaatgtgtgttaatggaatagattaagggtgttgggtttggggggtgagtgggggattggggagggttggggttgttttggtgtttttgaattgtgtgtggtgtttgtttttgtttgtgttattgtttggtttttttgtgtggggtgtgtggttggtgttagtgtggttgggagttggggttgggaggggagagttgtgtttgttttttttttttttgtgttttttttttttttgtggttttttttttttgtttttttgtgtgtttttttttgtaaggtggagtttggggttgatgtgagtgaatttatatggtatagggttggagaataaagagtgtgagttgaatttgtgttattgtagtgatttattttgggtagagtgttagggttttgagtgaattagtgagtgagtgaatgagtggtgtttggtggggatagaaagagggagagagagagagagagagagggagaggtgtggttgggtgaggtgggtttgtttgggagtgggttttggggaaggggtgtgggtttgggtgttggagtggggagtggggttgtgttttttttagtgttagttttatttgagttttatgagttgttgtttttttggtgtgtttggggttgtgggatgggtgtatgttgtttttttttagttaagtatttgagttgttttgaaatttgggtggtgagttggttatgggaagtttattttttggttttttttttaaaaggaagaaatagaagttttttttagtggatagtttttttttttgtttttttggttttgtttgaaattgggggtttttagggttggtaggttaggtttgttgggtttttaattttttttttaatttttaatttttgattgggttgtgggtttttgttgagttttggttgtgtgtgggggtgggagggtgtgtgtaggggagggattgagagatgtgttgattttttagagggagggattgggtggataattggttttgtggtgtttgtagagttggaaagaagtgttgtaagggatgtttgggggatgttgtttttgaggtgttgttgtttttttgtttttgttttttgtggtgggggagaaatttaggagtgaagtttagagtttgtggtgtggttggtggatgaatgagtgtgtagtagttggtgtgtggttgtggtgagggtgggggaagaaaaatattttgttttttttttggtttttattgtggattatgtattaggattattttgggaattttgatattttg

SEQ ID NO: 705 - DNA, 6205 bp, Artificial Sequence
  chemically treated genomic DNA (Homo sapiens)
tgaggtgttaaagtttttgggataattttggtatatgatttgtggtgggggttggagaggaaatagggtgtttttttttttttgtttttgttgtggttgtgtattggttgttgtgtgtttgtttgtttgttggttgtgttgtgggttttgggttttgtttttgggttttttttttattgtggagggtgaggatagggaggtggtgatattttaggaatagtgttttttgagtgttttttatagtatttttttttggttttgtgagtgttgtgggattagttgtttatttgatttttttttttaaaaagttggtgtgttttttggttttttttttgtgtgtgtttttttgtttttgtgtgtagttggagtttagtggggatttatggtttaattaaaaattggaaattaaaaaaaagattaggagtttagtgagtttggtttgttagttttggggatttttgattttagatagggttaaaaaggtggaaagaaaagttgtttgttgggagaaatttttgttttttttttttagaaaaggagttggagaataaattttttgtggttgatttgttgtttgagttttggggtggtttggatatttgattaggagaaggtggtgtgtgtttgttttgtggttttgagtgtgttagggggatagtggtttgtggggtttaagtagagttggtgttgagagggatgtggttttgttttttgttttggtgtttagatttgtattttttttttggagtttgtttttggatgggtttgttttgtttggttgtgtttttttttttttttttttttttttttttttttttttgtttttgttgagtgttgtttgtttgtttgtttgttggtttgtttggagttttagtgttttgtttgagatgagttattataatggtatgagtttaatttatattttttattttttagttttgtattatgtggatttatttatgttaattttagattttattttgtagggaggagtgtatgaggaggtggggggaggaggttgtggaggaggaagaggtgtgggaggggaggaggtgggtgtagttttttttttttagttttggtttttggttgtgttgatgttaattgtgtattttgtgtgaggaagttaggtggtggtatgggtgggagtgggtgttatgtatggtttggaggtgttgaggtagttttggttttttttagttttttgtttattttttgggtttagtgtttttggtttgttttattggtgtatgttgttaaagatggttatttgtgttagaggatgtgagtgtgggtttttttgtttttgggtgatgtggagggagagggatttttttgtttgtttttgagtgtgttgtggttttttttttgttttgggaaggggtttggggtggggttttgagagtggttgtgtgggttttgtttttggattttagaaaataattatagttttgatggtgagatgggtggtttggtgtggtgttattgggaggttgggagttgggtgtgtagagttgtttgtagggagggtgtggttgtgtgtggttgtaggtgttttttgtggtgttgttgagtgtagtgggtgttttgggtgtgtagggtgtttgtgttgttttgtggttgggtgttggtggggtatggtgttgggtggggttggtttgtttatttttttttttgtggtggtttgtttattggttttttttttgttttttgttttttatgtttttggttttatagttaatttgttaggagtagttttgaagatgaaattaattagttaagatattttggttgttttatatgttgggtaattaggatgtatttaataagagtaattgggtgtttataagtaaattttagattgttatgaattaaaaaaaaaaaaaaaaagttagtgagagggtgtgttttaatgttgttgtttttagttgttttggagtgaagtttagggtgtgggttgttggatatttgggttttttttttttgttgggtggggttgggaggggtgtggtgtagggtatagagtatagattttagagtaggaatgtttggttatgttatttatgagttgtgagattttggatgaattttttaatttttttgggttttagtttttttttataaagtgaaggagtttggagatatgattttaggtttttttttgttttggagttttaatttttttgttgagatgatggtgtgtgtgaatggagaagtattgtagtggaagttagggaatttaggttttggtttagggtttgtgttagttttagtttatttaatttttaagtagtgttagttatttgtattttatagggtttttatgaggatttaatgttaagaggtgttgagagtttattgttgataatttgttgtgtattgttatataatttttgtttttagtttttttatttgtaaagtgggggtgttggtagtagagaaaaatagagttgggaatgtgaagtttttttggggttttatataaagtgttggtatttttgggatggttggtggtatttggttgttttaagggttttaagatatggtaattttaaataatatttggggttattgtttatagttataaaatatattttgttttgaatgttatttttaaggatgtgtgtgtgtgtgtgatgaggtgaggttagttagattttttgtatttttgttgttgtttgttggatagagtttttaattttgtaggtttaggagaggggtgtggggtaggtggatgtgtgtgttggttgtgggtgttttgttttttttttttttttttttatttttgtgttttggtttgtttgggtgtttatgtgttttttttagtaggattgagtaaatgtagttttttgatgtaaaatgaattagtttttttttagtggtagtagtaaaatttagaaaattgggggtgggggtagggatgggaggggtatagaagaaattgtgatatttttttatttggtttttagtttttttttgtgttatgtgggttttaggttgttttagttaagttttgggggttgtaaagggaggtgtggttaaagtgttttgtttgagtttttttagtagtaattgtgtgttggagtggtgtgaatagatgtatttttggtttttttttgagtagtagaggttgttttgtttttttttatttggtggttgaaaatttgggtgtttttgggttttttttatatagtttttttagtaatgtggggggaaagaggtgggggaaggggagtgggagttttttttgtggtttttgtagttttgggtgtgtttagttttggttaggtgttgttgggagtgtgtgggtgagtgtatttttgtgtttttgtttgtttttgttttgttagttttttggttttttttttttttgtgggtttttgtaaagtttagtagtttggagatgtttgtagagtattatggaatttgtgttgatgtaatttattagtttttttttggtgtgttttggtttgttttagagtgttttgattttggtttttttttattttagaatttgtgttggttttttttgtttgttgggaggtttgtgttttgtagtttgtttatttttttttagtttttttagtgttggatatatagtgttgtgttttggtgttgttgtgggattgattttttttggttgagtgagtgttttagtgaattgtgtttgttatatagagaatttagtttttaagtgttttttttttgggaaattattttagaattatttagttagaaagggttttttggttttttggaatgttaaaaatagaggtgattttttattgagtgttaaaattagagttaggtattatgttgaatatagggtttgttttgtgaaatttttatagtaaatgttggaggtgggtattattttttggttgtagaagaagatagtgagattgaataatttgtttaggggaattggttagtgagttagtgatttgttaggagtgtagttgagattttttgatattaggtttttttttttttttaggatatggtatgatttgttttttgttggaatgtttttgttttttttttattggttttgaaaggtatggtttttatttggtgtatgattttattttatatttagaggtgtgttttaattttttattgaataaatagttttagtggtattttttagtttagagaagaggttatgttaagtgagggaagggaaggggaagagggaagttggggtgggaagaaaagggtagatgagttgggaagaaaagggtaggtgagttgtttttttattgtttttttgggtttttgagattttttttgttttatttttgttggtttttttgtttgtttattttggttagtgtttggtttttgagagatgaggaattttagaatagttgtttttttagagttgtgttggtttatatattttagtattggatatatgaagtttttttatatatattgttttatttgtttttatatatgatatttttgaaagggatatagatagtagagtgattttggattgttagaaaggaggttgaggtgtagagtgttatagtagtttatttaaaattttttagttgtaagtgttagagtttgagtttaaagttattttatttgattttaaatttagtgttttgttgtttgttatgtttttaattttgtaagtttaggagtaaattttatttttttttttttttttttttttttttttttttttttttttttggagatagtgtttttttttgttttttaggttggagtgtagtgttgtgattttggtttattgtaatttttgttttttaagtttaagtgatttttttgttttagttttttaagtagttgggattataggtatatgttattgtatttggttaatttttgtgttttttgtagagatggagttttattgtgttggttaggttggttttaaatttttggttttaagtgattagtttgttttggttttttaaattgttgggtttataggtatgagttattgtgtttaatttatattttttaatgatatattgttttttatatttattatgtttgaatgaatttgttattatttttttatagtaagttatattttttgatgatattgtaatatttttgaaagttagatgtattttataattgatgattattgaatatgtaagtgttgttgtttttgtttaaagatttgtgaattagttatgggtttattaggaaatagattttaatttagatggtttaaaggatgatgttttaatggagaaattttttatagaggtatgggtagagttaagagggaatttgaggtatttagagtttagtaatagtaggaaatgatgattatttttagggttgaaaagaggaggtaattatgttattggagtttagtgagtttgggattatgaaagaggggttatttagtaggtagagggaaggagttattgttagagatagtttgttgaaagggagggaggagttggggttaagaaatattagattattttttttattttttatttttttttttggttaaatggtagggggttgttgattaatgtagtttattaaggttggttttttagggtatagagaatggtaaagaagggtagagagtgtatttagtggggtatttagtaaatggggaataattagtatagattttattaagtatatgagggatttaatgagggattgtgttttagaatgaaggaaataaggtaaattagtgagttttatattttatttattgtggaagtgaataatggaatagtttgaatagtttttttaaattatattttttttttttattgatatatgaagttatttataatgatatatgagttattgaggtatgtattgtattttttaggtgtggagtagagaaaaggttatatttattgatgaatagggatttatatttggggaagaagtaagtatgatttttttttttgtggttttatataatttttttgaaattttaagagtaatttttttagttaaagtttttttagatgtgatatataagtttttatttaatatgatttttattttatgaatgggttatatgttaatggagaagaaatgaagataagaaatattattttagaggtaattataattatagttttaaaataataatttttatttgagtggggtattatatatttgtgggtatgttaaagtttatttataggttttgtttttaggattatagtattttttttatttt

SEQ ID NO: 706 - DNA, 6127 bp, Artificial Sequence; identical to SEQ ID NO: 694
  chemically treated genomic DNA (Homo sapiens)

SEQ ID NO: 707 - DNA, 6127 bp, Artificial Sequence; identical to SEQ ID NO: 695
  chemically treated genomic DNA (Homo sapiens)

SEQ ID NO: 708 - DNA, 6161 bp, Artificial Sequence; identical to SEQ ID NO: 672
  chemically treated genomic DNA (Homo sapiens)

SEQ ID NO: 709 - DNA, 6161 bp, Artificial Sequence; identical to SEQ ID NO: 673
  chemically treated genomic DNA (Homo sapiens)

SEQ ID NO: 710 - DNA, 6174 bp, Artificial Sequence
  chemically treated genomic DNA (Homo sapiens)
aaaatttaaaagggttagaaagagtttagggatggtaggggaaagttgtaggaattgatataaatatttgtagagggagtagaataattagtaattttaaggaaggataggaaataaaaggttaagtttgatagaataaatattaagattgaaatttaaagatgttaatgtaaaaatttgtaataaggtttgggaattattaatagaaataaaatagtaagtatttgttttattgatatattaggtttagatttgtgtgtgtaataagtaagtttaataatagtattatggttagattagtttgtttttttaagttattattttataatttattaagtaaataagggattaaatgtttttttatttatttgatgtgatttttttatatgtatatagttaatgagttttatttagttgaaaattttttagtaaaagttttaaagatgagtttatgaatttattttaaattttattagttaaattaggttaaatggaaggaatttaaatgagtattgtttaattagagtttattatttgtaagttattagtaattttaaaattttatttagatttaattattgaaaatttgtatataatgaagtgaaagaatttttatttattaattttttaattttaggtttttaaagaaaaatttaaggaatatttattaaaattagataagaaaatttaaatttgtatagttattagatttgttttattataattagtttgtatatagttatatattaatttgttttgtatatattttagaattgaatagaataaagtttagtatagaaaagttgtaagaaataggtttttaattatggaagttgtaaagtttaaaagggtatgaaaaaaattaatgtaaatttgatattttttttgttttaaagaaatagattttttgtaaaaatatatataatttttataaatatatttataagttgttttaagaattgaggatatttatatttataattaattattgagttttttgttaagtattattggtgataaattaggttaataaagtaagaattatggaaattaagttaaagtataataggtataaaagttttgaatatttggattttttaagaagtatattgggaaagttaattagagagaggaaaagttttttttgtatagtattgaggtttatagttatagttttattatttgtaatttttatataggttattggtatttttagtgttttttttaatattatagtaaattaatgaatttggtgggtaattaattttatgatttgtttggttattggttatttttttgtttttaataaggaaattaagtttttttattttattatttttattaaatttaaaagtttttttttatagttttttaaataaagtttgtttgttgttgaaattgaattttgttttttttagatagtgattttttaattaatggggagtattttttttatgtatttatttttgttagttataatttttttgttatttgtttttttggttaggttgttagggtgtaattttaggaagttatagtttggagtttaattgtataaattggttttggtggtggtggtggttggttaaaagttaattattgtatttatagtaaggttattttattagatatgttaaattagtttttattttagtaatatttgtaaaagttagtagtatatttttgatgttattttttaggttttttatatggaagaattttataaatttattttagaaaataaaaaagaaaagtatatttttaagtatgggtttttgtttttttataatattattatttagagagaaggtaaattaaaatatttaaggtttttttttaaagtaatagtaaattaattattatttattttggggtaaaaaaagaaaataagttttttagttttttaagtggggatttatgataattaaattttattttatagtattattttggttttattaggatttattttaataaaaggatttttagagtttttatgaggtaaaagatgaaaatttttatttttaaatttttattatttaatattttagtaatgttttaattgtgtagattagttttttttaatgtagttaagtatattttgtattagatttgggtttgtttaaaatgtaggttttattttatattttttttattaaaataggtattgttttaggaattattttagttatttttttttggtgatttatttttttatggtttgaatttattgaagagtatttaattgaattggaataaaaaattgtttagagaaaattaagatttttgatataatttaagattgttatattattatttttaaggatttattatttaaattaatattaaataaataatggttttttagttagagtttgtaaatagttgtgtgttataaaaatttttagatatttttatttttttaaaaaaaattttttattttatttttattttaaggttttttttatttttaaggtaaatttatttagtttttttgtttaattagttagttttgttttgtttttatgagaatgtttgtgatattttttgttaatggtttgatgtagtttttttggtttatggtttttaagtgtttagttataaaggtattaaaagaaatgagagttataattttgttttagtttgttatgttgttgttgaaaatatggattattatttgagataatgattttatattgtttttgtttttgatgtttagtttttgaagtatgtttgagaaagaaaagtatgtaggtttttatggttttttttgtttaaattggtgtaagatttgtttgtttatttgtggtgggaaaattgttattgggatttatagaatttaggttgattttatttgaaattgatattttattttttttggtttttgaataagagttgttatttttaaaagaattaagatgggtggaaataatgatttatggttagaatattttggttttaggaataggatgagatatgttttaatattgatttgttttggtttttaatttatttttggtgggtgagtttggggagagatggaaaaaagggagtgaggttttggtgattaatgaatttttttattttggaaggttgttttgtggttgtgttgtatgttatttttaatttgttgtaaggtttttagtgtttttttgttggtggttttagatttgtttattggttttgtgtttttggtgttggtggtttgtttttgaaggtattgagagataatttttagtgattgttggtataatttgtttttttttttttttgttggtggtggtgttgagggtagtgatttgtttgtattggtgttattattagattttttgattaattttagtagtggtaggatagttggttgttttttgagaggttttggtttgtatttgtttagtttttttttgggtgatatgatggtgttagtggttggggtttttatttttttaagtggtgttgtgtggtgggtgggtgtgaagaaaagtagttttgtgggggttgtggtgatgttggggattttggtgttaatgggtggtggttgtgtgattttttgggagtttggtgtgagggtggatggggggtttgtgttggtgtttttgttaattattgtgttggttttttttttttttattttttgttgggttgaggtttttttttttgtagttaaaagttgtttttttgggtgggtggtgttgttgttgttggtttttaagttggtttttttatagtagaggttgagtttgattattgtgttttttttgaggttaaatattgttagttgttgttgttgtttggttgagaaaattggggaagattttgattttttattggaaggaagtggaagtgagaagtggtgagtagtttttttattatggttttagggtggttagttttatggggtggtgttagtgaattttttttttttaaaaaaagtatttttataaaaggggaaaggggtggtagtttttggagggttgtgtatggtatttattagttgtttggttgggttggggtggggttggggttggggttggggttggggtttgagttggggtttgagtggggttttttggtttttggaggttttgagtgttggttatgtaatggtggttttgagtgtttggggtttttttagagtttttgggtttgagttttttttatgagtattttgggtttttttgtggttatttttgtgtttttttgagatttgatttgtgagttttttttgttggtttttgttagaggttttttattaaattaaaattttaattattgattaatataggggttgaaggaagaggatggggaagtttagtgatggatgggaataatagttttagatgatagggataattaagagggtatagttggggatttgtggttattttgtatagttttttatttttagtttaatgtttggaaatgaggatgttttatgtgttattttaaagaattatttatgtaagtggattaagttaaaattgttatagttaaattatttttgtttttttgtttgttttttttatttttgttttatagtttttggtgttatttatatataggttttaatttattagaattttgtttgagagttttgatattattttttgtttgttttgagatagtttagttttgttgtttaggttggagtgtagtggggtgattttggtttattataagttttattttttatgtttagatgatttggtattttagttttttgagtagttgggattataggtgtgtgttattatatttggttagtttttgtatttttggtagagatggggtttttatgatgttggttaggttggttttgaatttatggttttaagtgatttgtttgttttggttttttaaagtgttgagattatagttgtgagttattttgtttagttgattattgtatttttagtagagatgtgttttatgtgtgtttgtgtgaagatattattaaataggttttgtgtgagtaatatggttgtttattttatttgggtgtaggtgggttgagtttgaaaagagagttagtaaagggtgatggattattattagtttttataggttttgggataggtggtgaagttgagagtaatgttttgtgggtaggggtggattttataaagtatatttttaagggtggggagaattataaagaatttttttaagggtgggggagattataaagtatattgattagtttgggtggggtagaaataaattataatggtggaatgttattagttaaggttatttttattttttttgtggatttttagttattttaggttatttggatgtatatgtgtaagttataggggatgtgatggtttggtttgggtttagaggtttgataatgtggttttattatgttggttaggttggttttaaatttttggttttaggtgatttatttgttttagttttttaaagtgttgggattataggtgtgagttattgtatttagttgatattatttatttttgtattgataataaggtatatttgattttagaggtttgtaaagtttttgagaataaggatttttttatatgttatgtatgttagttaatgttaattaaagtagtttttttgttaaaagatttgtaaaaataatagttaaaatttaaaagtaaggtgttgagagatataggaaaggtgagtaagtttattttttatttatttttttgagatgaggttttgttttgttatttaggttggagtgtagtggtattattagtgtttattgttgttttaattttttgggttgaagtgatttttttattatagttttgtgagtagtgaggaatataggtgtatgtttttatatttggttaatttttttattttttgtagagatggggtattattattttgtttaggttggttttgaatttttggatttaggtgatttttttattttggttttttaaagtgttgggattatagattgggttttgtgttttatgttaataattttagtattttgggaggttgaggtgggtggattgtttgagtttaggagtttgagattagtttgggaaatatggtgaaattttgtttttattaaaaatataaaaattagatgggtgtggtggtgtgtatttgtaatattagttattttggaggttgagataggagaattgtttgaatttaagagatggaggttgtggt

SEQ ID NO: 711 - DNA, 6174 bp, Artificial Sequence
  chemically treated genomic DNA (Homo sapiens)
attgtaatttttgttttttgggtttaagtagtttttttgttttagtttttagagtagttggtattatagatgtgtattattatatttatttaatttttgtgtttttagtagagatagggttttgttatgttttttaggttggttttaaatttttgggtttaagtgatttatttattttagttttttaaagtgttgggattattggtatgaggtatagagtttggtttgtaattttaatattttgggaggttaaggtaggaggattatttgagtttaggagtttaagattggtttgggtaaaatagtgatattttatttttataagaaataaaaaaattagttaagtataggggtatgtatttgtgttttttgttatttgtgaggttgtggtgggaggattattttagtttaggaggttgaggtagtaatgagtattgatggtgttattgtattttagtttgggtgatagggtaagattttattttaaaaaaataaataaaaagtgagtttgtttattttttttatgttttttagtattttgtttttgaattttagttattatttttatagattttttaataaaaaggttgttttaattaatgttaattaatatatatggtatataagaagatttttgtttttaagggttttataaatttttagagttaaatgtgttttattattagtataaaaataaatggtgttagttgggtgtagtgatttatatttgtaattttagtattttaagaggttgaggtaggtggattatttgaggttaggagtttgagattagtttggttaatatggtgaaattatattgttaggtttttgagtttaagttaagttattgtattttttgtgatttgtatgtatatatttagatggtttgaagtaattgaagatttataaaagaagtaaaaatagttttaattgatgatattttattattgtgatttgtttttgttttatttgaattgattaatgtattttgtaattttttttatttttaagaaggttttttgtaattttttttatttttgagaatgtattttgtgagatttatttttgtttataaaatattgtttttaattttattatttattttaaaatttgtaagaattaatgataatttattattttttgttgattttttttttggatttagtttgtttgtatttaggtgaaataaatagttatgttgtttatataaagtttgtttggtggtgtttttatatagatgtgtatgaaatatatttttattaaaaatataataattagttgggtgaggtggtttatagttgtaattttagtattttgggaggttgagataggtaggttatttgaggttatgagtttgagattagtttggttaatattgtgaaaattttatttttattaaaaatataaaaattagttagatgtggtggtgtatgtttgtaattttagttatttgggaggttgaggtattgaattgtttgaatgtgggaagtggagtttgtagtgagttgagattgttttattgtattttagtttgggtaatagagttagattgttttaaaataaataaaaaatggtgttaagatttttagatgagattttaatggattaaggtttatatgtaaatagtattaaagattatggaatagagatgggagaagtaagtagggaggtaggaatagtttagttgtggtagttttagtttagtttatttatataaatggttttttagggtagtatgtggagtatttttatttttaaatattggattgagagtagagagttgtgtaaaataattataagtttttaattatgtttttttaattatttttattatttaagattgttgtttttatttattattgaatttttttgttttttttttttaatttttgtgttagttaatggttgaaattttgatttggtaaaaaatttttggtgaaaattagtaaaaagggtttataaattaggttttagggaagtatagaggtagttatgagaaggtttgaggtgtttatggaaagagtttgagtttaggagttttgggaggattttaggtgtttggagttgttgttatgtaattggtatttagagtttttgaagattggaaggttttgtttaggttttggtttaggttttggttttggttttggttttggttttgttttggtttggttgggtagttggtaggtgttgtgtgtaattttttggaagttgttgtttttttttttttttatgggaatattttttttaaaaaaaaagagtttgttggtgttattttgtaggattggttgttttaaaattgtgataaaggagttgtttgttattttttatttttgtttttttttagtaaggagttggggttttttttagtttttttagttaggtggtggtggtgattggtaatgtttggttttaaaagaaatgtggtaattggatttaatttttattgtgggggggttggtttgggggttggtagtggtggtgttatttgtttgggagggtgatttttggttatggagaaggaggttttggtttggtgagagatagggggaggggaggttggtgtggtgattggtggaagtgttggtgtaagttttttgtttatttttatgttagatttttggagggttgtgtggttgttgtttattggtgttgaggtttttgatgttattgtgatttttgtgaggttgtttttttttgtgtttatttgttgtgtggtgttgtttgaggagatggaagttttggttgttgatgttattatgttgtttgaagaggagttggatgggtatgagttggagttttttgggaagtggttggttgttttgttgttgttggagttggttggggaatttggtaataatattagtatggatgggttattatttttgatgttgttgttagtagaggaggaggaggatgagttgtattggtagttgttggagattattttttggtatttttgggagtaggttattggtgttaaggatataaagttaatgggtaggtttggggttattagtaggaaggtgttggagattttatgatgggttggggatggtgtgtagtgtaattatgagatggttttttaaggtaagggggtttattaattgttaaggttttatttttttttttttatttttttttggatttatttgttaagggtgggttggaaattgaaatgagttagtgttgaaatgtgttttattttatttttgaagttagaatattttggttatgagttattgtttttgtttattttgatttttttggaaatggtagtttttgtttaaagattggaaagggtgggatgttaattttaagtggggttaatttgagttttgtaaattttagtagtgatttttttgttgtgggtgggtaggtgaattttgtgttggtttagataaaggaggttgtgaggatttgtatgttttttttttttaggtatgttttggaaattggatattaaaaatgaagatgatgtgaaattgttgttttgagtgatgatttatgtttttagtgatggtgtaataaattggggtaggattgtgatttttattttttttggtgtttttgtggttaaatatttgaagattataaattaagaaagttgtattgaattattagtagaaagtattatagatgtttttgtaaggataaaatgggattggttagttaaataaagaggttgggtaagtttgttttaaggatgaaaggggttttggagtggaagtagaatgaaggattttttttagagaggtggggatatttaaaggtttttatgatgtatggttgtttgtaggttttaattaaaggattattgtttatttgatgttgatttaagtagtggatttttagagatagtggtatggtggttttgaattgtattaaaaattttggttttttttaggtaattttttgttttaatttagttgaatattttttagtggatttaaattatgaaaaaataagttattaggggaggatagttgaaataatttttaaggtggtgtttgttttaatggagaagatatggggtggagtttgtgttttaaataaatttagatttgatgtaggatgtatttaattatgttgagaaaaattgatttgtgtaattgaggtgttattgaaatattaggtggtggagatttgagaataagggtttttgttttttattttatgggaattttggaagtttttttgttaggataaattttaataagattaagatagtattgtaaaatgaagtttaattattatgggtttttgtttaagaaattgaagaatttattttttttttttgttttggggtgaataataattggtttattattgttttagggggaaattttagatattttaatttattttttttttggatagtagtgttgtaagagagtagaaatttatatttgaaaatgtgttttttttttttgttttttaggatgggtttgtggagtttttttatgtagaggatttagaaggtggtattaggaatgtgttgttggtttttgtaggtgttgttggagtaggagttggtttggtatatttaataagatagttttattgtaagtgtaatagttgatttttaattaattattattattattaaaattagtttatgtagttggattttaagttgtaattttttagagttgtattttagtaatttagttagaaaagtaagtggtaagaggattatggttaataagaataaatatatgggaagagtgttttttattgattgaagagttattgtttgaaagaagtaaagtttagttttagtaataaataaattttgtttgggaagttatggaggaggatttttagatttagtgaagatggtagggtggaaagatttaatttttttgttgagaataggaaagtggttagtagttaggtaagttatagaattgattatttgttgaatttattaatttattgtagtgttaagagaagtattaagaatgttagtgatttgtgtaaaagttataagtaatagaattatgattgtaagttttagtattgtataagggaagttttttttttttttaattagtttttttagtatattttttagaaagtttaagtgtttaggatttttatatttgttatattttggtttggtttttatgatttttattttattagtttagtttattattaataatatttgatggaaggtttagtaattagttatgaatatggatatttttaatttttaagatagtttgtaaatgtatttgtaaaaattgtatatatttttatagaaagtttatttttttgaaatgaaggaagtattgaatttatattagttttttttatatttttttgaattttgtaatttttgtaattaggaatttgttttttatagtttttttatgttaaattttgttttgtttagttttagagtgtatatagaatgaattgatgtgtaattgtatgtagattggttgtagtggaataaatttgataattatgtaggtttaaatttttttatttgattttggtaagtattttttaggtttttttttgaaaatttgggattgagaggttgatgaatggaaatttttttattttattatatgtaagtttttaataattaggtttaagtggagttttaaggttattgatgatttataaataatgggttttgattgggtaatatttatttgagttttttttatttgatttaatttaattggtgaaatttaaagtgaatttatgggtttatttttaaagtttttattaaaagatttttagttgaatggaatttattagttgtgtgtatataaaaagattatattaggtggatggagagatatttgattttttgtttgtttaataaattataaaatgatggtttggaaaagtaggttagtttaattatggtgttattattaggtttgtttgttatatatataggtttaagtttagtatgttaataaagtaaatatttattgttttgtttttattaatgatttttaaattttgttgtaagtttttgtattggtatttttggattttagttttgatgtttgttttattagatttaattttttattttttgtttttttttgaaattgttgattgttttgttttttttatagatatttatattaatttttatagtttttttttgttatttttgaattttttttagtttttttagatttt

SEQ ID NO: 712 - DNA, 6244 bp, Artificial Sequence
  chemically treated genomic DNA (Homo sapiens)
tgaatattttggggagttgggaaagaatatagatttttgggttttattttagagattttgatgtaagaggtttgatgggaaggaggggttgaggttttgtatttttttttttttgatatggagttttatttagttgtttaggttggagtttagtggtttgattttggtttattgtaatttttgttttttgggtttaagtaatttttttgttttagtttttttgagtagttgggattataggtatatattattatgtttggttaattttttgtattttagtagagatggggttttattgtgttagttaggatgattttgattttttgattttgtgatttatatgttttgattttttaaagtattgggattataggtgtgagttattatatttagttgaggttttgtatttttaataagtttttttgggataggagttattgtagtatattattaattttttttaagttttaataatttatgttagtagattttaaataaattatatgggaagggggagggagttttttgtggaatattatgaaatgtgaataaggtgaattttttttttatataaattagaaggaattttagtagtaggaaatgattatattttatatatggatatttattattaaagtattaaaagatagaaaatatttttgagaaattatattagtaagatggaaattgttgaaatttaagtgtttaatgtaataggagaagttgtttgattggttgtttagagatatatagaggtgtataaatttatattttgatatttatttattttttagtaggttttaggagtttaagatttgggtaaaaatttggaaatatagttattaattttgttttgttttgttgttatttaatagaatatggttgtttaatttagtggtttttaggaagggagttagagaataataggaaatttttattatatttagttttgtttttttgtttttatgatagagttagtgttaggttaattatgaaagtttgttagttttagtataatgttttgaaagaatgtgtatgtgattttaagagggttttgataatatttttgttgagtgagatatatatgagggtaattatagtaaagaataaggtttaagttagatagatagatagatttgggtttgagtttataataatatgatttttttttttttttttttttttttttttttttttttttttttttttttttttttttttttttttttttttttttttttttttttttttttttttttttttttttttttttttttttttttttttttttttttttgatggagtttggttttgttgtttaggttggagtgtagttgtatgattttggtttattgtaagttttgttttttgggtttatgttatttttttgttttagttttttgagtagttgggattataggtatttgttattatgtttggttaattttttgtatttttagtagagatggggttttattgtgttagttaggatggttttgattttgtgattttttatttttggttttttaaagtgttgggattataggtgtgagttattttgtttagttgattttttttttaagtaagattgttgtgtggattaaaagagaaaaattagtgtgaaatttattagtagtgtttgaagttttatatatgagattattttttggttgtattttttttataggtaggaggagatttgttagaggttatatagaagtttagtggtagagttaggataagaatttattattttgatattagagtaatgaaattttttatgagtttttattgttttataattttgaaattttaatatttgtttgttgttgggtttttatttagttggtaaatattgatttgtatttaatgttatttttttgattaggtattggggatatggaggaggataagatataaagataattattatgggttaggtgtggtggtttatttgtgtaattttagtattttgtgaggttgaggtaggtggattatttgaggttgggagtttgagattagttttattaatatggagaaattttatttttattaaaaatataaaattagttgggtttggtggtgtatgtttgtaatttgagttatttgggaggttgaggtaggagaatagtttgaatttaggaggtggaggttgtagtgagttgagattgtgttattgtattttagtttgggtaataagagtaaagttttgttaaaaaaaaaaaaaaagaaaaaaagaaagaaagaaaagaaattagatgaaggtgttaagtgggttttttgttttttttattttatagttttaatttttttttggttttatttatgttttgttgatgatatttaaatttatatttttatagtaatatttttttatttttaaattagaatatttaatttttttttgtgagtttttatataattagaatagaatttgttgttgttttttataaatttgttttttttttgatgaattttatttaggtatttaagttttgagtatttgttttttatattttattttttttaaattttatggattttgttgtttaagtatatagtattttgaatttttttatttatttttatttttagagtttgtagtttagttttggttattgttattttttttttgggtgtgaaatagatttagagttaggtgtttttagtgattaggatatgttggtttttgttttttttttaggatttggtatgtgttgttttttttttggaatttttgttattatttttgatttgggtttgtgattttgttttggaagttgtttttgttttttgttttgggtttttatattttatagtttattatttttttttgtattgtaggaatagtgtttgttttgattatttttttatttagtaattagttgtgtttagtattgtatttatttattatatgaatgaatgaagaatgaatgatagatgggttagattattgaaagttttaaaatgtttataaggaaattggttgtattttattgttaggatttaggttagtgtttggaaaggttttgaggtaatgatatggttggttgtttaggttggttttattttatgggtttgtttgtttttattttggataaagtttggttttaattgttttttgttgtagttttaattggttttagttttattggtttatatgttttgatattggtttgatttaaaggtagaagatttggaaagtttgggattagtgtgtgttagtttaatttttttattagatattagttgttttgtttttatgaagggttttagttataaggttttttggtttttggaattttaattttttgttagattttttttttatattgttttttttgaggaaatgtgatttatgttggttgttgtggttgttttaatttattagtttgttttttttttgtgaatggtttttttggtttttgtgttgttatttaggtttagggggtggggttttgatgtgatttagtgtgtttgtgttgattgttttggttaggtttaaagagtaggtggggtagagatttatatttttggtgttgagttgaggttaggaaggggtggttgatgagagggtggttttagtattaggagtgtgttggttgtattttggtggatggattttgggaaggaggggaggggattattggggttggtggggagttatgggtatgtatagtttatagagtgttagagttgatgatgattagtggaagatggggaaattaatgtttagagtgggatagttattattttaggggtatataattgataagggtgggggtggttgtggtaatggaggttttaaggaggggtaggggtttatagtatgttaggggttgagtttgtattagaatttaggtttgttttttagtttagttaagttttagaaaaatttttttgattttatttatttttttttaatttgggatattagtagggaaagtattagaggtaaaaggaaaggatttttatttttttaggaatgttgaagttaggattgtttgaggggagttttgtgttttttagatttttttgtattgtttatattaggatttggggtagtttttaaaaatatgtggatttatgatttttattttttattttattgtttggtagtttttaggtgttttttttgttttttttttttgggttgtgataggtttgtttgtagtttgaagtatttgatatgaattttagttaaatggaatgtattagtttagtttttagggaattaattataaataagatatagttattgtttttagtttgataagataggtaataaattgtttttttgaaggaattagggatggtttttggggttttgaaggatggataggaaggtataggtagtgaaggaggtaggggtagaggtgagaggttgggatggggatagtgttttaaattgtaggaataaaagtagtaaaggttggttgggtgtagtggtttagatttgtaattttagtattttgagaggttgaggtaggtggattatttgagtttaggagttggagattaggttgggtaatatggtgaaattttgtttttattagaaatataagaattagttgggtgtgttggtttgtgtttgtaattttagttatttgggaggttgtggtgtgagaatttttgagttttggagatggaggttgttgtgagttgagattatgttgtagtatttttgtttgggtgatagtgtgagattttgttttaaaaataaaataaatgagtagtgaaggtatataattttgagggttgtttggtttgttttatagatattgaggagtttggtgtggataatgaggaagggtttgagggttgtaataggatttaggtgtttaggtttggagaggtagttttagatgttagttttattgagtaataggagttaagggttttaagtaggggaaggatatggttagttttgtgtgttaggtattggttatagtgtgataaatggtttggaagtggggagatgggttagagaaagtagagagagttaagatgtgagattatgaggttgtagttagtgtagtagttgtggagatggagtgaagtgaatagattaaagaaatttaggagtgagaatttttagtgattgtaaattagtggtttaatttagggattaagatttttttgattttttttttttttttttttttttgagatggagtttttgttgttgttgtttaggttggagtgtagtggtatgattttagtttattgtaatttttattttttaggtttaagtaatttttttgttttagttttttaagtagttgggattataggtgtttattattatatttggttaatttttgtatttttggtagagatagggttttattatgttggttagattggtttgaaatttttgagtttaggtgatttatttgttttagttttttagagtgttaggattataggtgttagttattgtgtttggttttttttgattttttaaataaattatgtatattatttgattataggataggttgagttttttagttttttgtgtgtggttatgggatggggggagatggtggtagataggtgtttggttatttttagaataatgttttttgatgttttttttttgttggtttttgtatttgaggggataagtagttgttaattagaataggttttaggtggtaggaagaggtttttgggttaattaggaataaaagaagttatttttagtgtagtatgaaattaaaaattaaaagtatgatttagggttttttgtgtaggttttttttttttaagatgggtgttaagtgatgagtattaggtgtttatggtgagatttggggaggattttagattttaatagttttttggttgaaattttttataatgtggtaggtaagatgtttttatttttattttgtagatgtggtagttgagttttagaagttatgtgatttgtttaaggtgatttagtttgtggtaggattgggagtgaaggatttttgattaagaatttttttagggagtgtttgttttttttgtattttttgtttgggtgtttttttttaaaattttggtatgattggtttttttggttatttagatgttttatttttggaggttgttttattttataagtttattatgttattttttttttttttttgagatggagttttattttgttgtttaggttggagtgtagtggtgtgattttggtttattgtaatttttgttttttgggtttaaataatttttttgtttt

SEQ ID NO: 713 - DNA, 6244 bp, Artificial Sequence
  chemically treated genomic DNA (Homo sapiens)
gaggtaggagaattgtttgaatttaggagatagaggttgtagtgagttaagattgtattattgtattttagtttgggtaatagagtgagattttattttaaaaaaaagaaaaggataatgtgatagatttatagggtggggtagtttttagggatgaaatatttgaatgattaaaggagttagttatgttaggattttggaggaaagtatttaggtagagagtgtagaaagggtaaatgttttttggaaagatttttagttaagagttttttatttttagttttattataaattgggttattttgaataagttatgtaatttttgaggtttagttgttatatttataaaatgggaataaagatattttatttgttatattgtgagaggttttaattaaagggttgttaaggtttgggattttttttaaattttattatagatatttgatatttattatttggtatttgttttggaagaggggaatttgtatagagaattttgggttatgtttttgatttttaattttatgttgtattagaaatagttttttttgtttttggttgatttaggagtttttttttgttatttggggtttattttagttaatagttgtttatttttttaggtataaaagttaatgaggaaaggatattaggaaatattgttttgggaataattagatatttatttgttattatttttttttattttgtgattatatatgggagattggaggatttagtttgttttgtagttagataatgtatatggtttatttaaagagttaaaaggggttgggtgtagtggttaatgtttgtaattttagtattttgggaggttggggtgggtggattatttgagtttaagagttttagattaatttggttaatatggtgaaattttgtttttattaaaaatataaaaattagttgggtgtggtggtggatgtttgtaattttagttatttgggaggttgaggtaggagaattgtttgaatttgggaagtggaggttgtagtgagttgagattgtgttattgtattttagtttgggtaataataatgaaaattttgttttaaaaaaaaaaaaaaaaaaaaagagttaaaaggattttggtttttgggttgggttattgatttatgattattaggagtttttatttttaaatttttttgatttgtttgttttgttttatttttatagttgttgtattggttatagttttatgattttatattttaattttttttgttttttttggtttatttttttatttttaaattatttgttatgttgtaattagtgtttaatatataaaattaattatgttttttttttgtttaaagtttttagtttttgttgtttagtggaattggtgtttgaggttatttttttaagtttaagtgtttaagttttgttgtaatttttaggtttttttttattatttatattaaattttttagtgtttgtaaaataagttgagtaatttttagaattatatgtttttgttgtttgtttgttttgtttttaggatagggttttatgttgttatttaggtaggagtgttgtagtgtgattttagtttatagtagtttttgtttttggggtttaagaatttttatgttgtagttttttgagtagttgggattataggtatgggttaatatatttggttaatttttgtatttttagtagagatggggttttgttatgttgtttagtttggtttttaatttttgagtttaagtaatttatttgttttggttttttaaagtgttgggattataggtttgagttattgtatttagttagtttttgttgtttttgtttttgtaatttggaatattgtttttattttagttttttatttttatttttattttttttattatttatatttttttatttattttttaagattttaaaaattatttttgatttttttagaaaggtagtttattgtttattttattagattgaaagtagtggttgtgttttatttatggttaattttttagaagttggattgatatattttatttaattaaaatttgtattaggtgttttggattgtagataagtttattataatttagaaggaagaaatagggaaggtatttgggggttgttaagtaatgaggtggggggtaggaattatgaatttgtatatttttaaaaattgttttagattttgatgtaaatggtataagagagtttgagaaatatagggttttttttaaatagttttgattttagtatttttggaaaaatgaaaattttttttttttgtttttaatgttttttttgttggtattttaggttaaaaaaaaatagataaaattagggggatttttttgggatttggttgggttgggaaataagtttgggttttaatataggtttagtttttgatgtattatgggtttttgtttttttttggggtttttattattatggttatttttatttttattaattgtgtgtttttgaggtagtgattgttttgttttgagtattagtttttttattttttattagttgttgttagttttgatgttttatgagttatgtatatttgtagttttttgttgattttgatggttttttttttttttttttaaggtttatttgttagggtgtagttgatgtatttttaatgttaaggttgtttttttattgattgtttttttttggttttgatttagtgttaaaggtatgggtttttgttttgtttgttttttaagtttagttggggtggttagtgtaagtgtattgggttgtattgaggttttgttttttgagtttgggtagtggtgtgagggttgggagaattgtttgtggaggaaaggtgaattagtaggttggggtggttatggtggttggtatgggttatgtttttttgggaggaatgatgtgagggaggggtttggtaagagattggaattttggaggttgggagattttgtggttgaaattttttgtaggagtggggtaattagtgtttagtgagggggttgggttggtgtgtattgattttagattttttggattttttgtttttagattgggttggtgttggggtatgtaggttagtgagattggagttagttagagttataatggggagtgattagggttaaattttgtttagggtggaagtgagtgggtttgtgaagtggggttagtttgggtagttgattgtgttgttgttttggggtttttttaggtattggtttaagttttggtgataaagtgtgattgatttttttgtgggtgttttgaggtttttggtgatttgatttgtttgttatttattttttatttatttatgtgatgaatgaatatagtattaagtgtggttaattattaggtagagaagtgattaagataaatattgtttttatggtatagggaaaagtgatgggttgtagaatgtagaagtttggggtggagaatagggatagtttttggaatgaaattgtgagtttagattaggagtggtggtgagagttttaaagagaagatagtatgtgttaagttttggaagggggatagaggttaatatattttggttattgaagatatttgattttgaatttgttttatgtttagggaagagatgatagtggttggggttaggttataaattttggaaatggagataaataaaggaatttaaagtattatatatttaggtagtaaaatttataggatttggggagagtgagatgtaggaaataagtatttaaggtttgggtatttgggtggggtttattagagaagaagtagatttgtgggagataataataaattttattttggttgtatggagatttgtaggaaaaaattggatattttagtttgaaggtaggaaagtattgttgtgaagatgtagatttgaatgttattagtaaaatataaataaagttaagggagggttgaggttgtagaatgagaaaaataaagggtttatttagtatttttatttgattttttttttttttttttttttttttttttttttttttttgatagagttttgtttttgttgtttaggttggagtgtaatggtatgattttggtttattataatttttattttttgggtttaagttatttttttgttttagttttttaagtagtttggattataggtatgtgttattaggtttggttaattttgtatttttagtagagatggggtttttttatgttggtgaggttggttttgaatttttgattttgggtgatttgtttgttttggttttataaagtgttgggattatatgagtgagttattatatttggtttatggtgattatttttatgttttatttttttttatatttttagtatttagttaagggagtggtattaaatgtaaattagtgtttgttaattaaataaaagtttaatagtaaatagatgttggaattttagagttgtggaatgatgggggtttatggagggttttattattttaatgttaaggtaatgggtttttgttttggttttgttattaggtttttgtgtgatttttgataagtttttttttatttataaagagagtatagttaaaaaatggttttatgtatagagttttaaatattgttgataaattttatattgattttttttttttaatttatatagtaattttatttgaaagggaagttggttgggtggggtggtttatgtttgtaattttagtattttgggaggttgagagtgggggattatgagattgagattattttggttaatatggtgaaattttgtttttattaaaaatataaaaaattagttgggtatggtggtaggtgtttgtagttttagttatttgggaggttgaggtaggagaatggtatgaatttaggaggtggagtttgtagtgagttgagattgtgtggttgtattttagtttgggtgatagagttagattttgttaaaaaaaaaaaaaaagaaagaaagagggagggagagagagagaaagaaagaaaaagaaggaaggaaggaaggaaagaaggagggaagggaaagggaaagggaaaaggaaggaaggaaagaagggaaagggagaagttgtattattatggatttaaatttaggtttgtttgtttgtttgatttgaattttgttttttattatgattgtttttatgtatgttttatttaatagggatattattaggatttttttgagattatatgtgtatttttttaaagtattgtgttgaggttggtagatttttataattggtttggtattggttttgttatggggatagggggatagagttgaatgtgatggaggttttttattattttttaattttttttttggggattattgagttgggtaattatgttttgttaaatggtaatagggtagaataaaattagtgattgtgtttttagatttttatttagattttaaatttttgaggtttgttgaaaaatgaatgagtattagggtgtgagtttgtatatttttgtatgtttttgggtaattaattagataattttttttattatattggatatttgggttttagtaatttttattttgttaatgtgattttttaaaaatattttttgttttttggtgttttgatgataaatgtttatatatggaatgtagttattttttgttattaagattttttttggtttgtataagggaggagtttattttatttgtattttatggtattttataaagagttttttttttttttttatgtaatttatttgagatttgttgatatgagttgttggagtttgaagggaattaataatgtattgtagtgatttttattttaggaaaatttgttaaaaatataaagttttggttgggtgtgatggtttatgtttgtaattttagtattttgggaggttgaggtgtgtggattataaggttagaagattaagattattttggttaatatggtgaaattttgtttttattaaaatataaaaaattagttaggtgtggtggtgtgtgtttgtaattttagttatttagggaggttgaggtgggagaattatttgaatttaggaggtggaggttgtagtgagttaagattgagttattgaattttagtttaggtgattgagtgagattttatattaaaaaaaaaaaaatataaagttttaattttttttttttattaggttttttgtattagagtttttgggatggggtttaggaatttgtatttttttttagttttttagaatgttta

SEQ ID NO: 714 - DNA, 6112 bp, Artificial Sequence
  chemically treated genomic DNA (Homo sapiens)
aaagttgtttttaaaaaaggtatgaaggggtaatggataaaaagtttattagggtttaaggttaaattagtttgagtttgaatgtttaatttattattaagtggtggatgatgttagaaaaattatatttttaagtttgtttttttaattgtttattattttttttttataattgttgaaaagtgaaatttttaatatagtattagatatataaaaggtattatggaaatgttttatttgttttaagttttataatttttaaggtttttagaaaaattttaaagagattagataatatatatttttgaagattttaaataagttattaaaagtatattagagaagtgtttgttatgtttgttgggagaggttgtatatatatatatagaaaatattattaatgtaggtaatggtatttttttataattataatataggatgggattgtgttggaaatgggtattattaggaaagtttatattttatgattttaaatattttaatttttttttttggttttttattttagtaatatgtaatatgtaaattttttttgttaagaaaaatgttttaagataaggaattggttagttagggtggtttatgtttgtaattttagtattttgggaagttaaggtaggtgggttgttagggatgaggagtttgagattagtttgggtaatgtattaagattttattattattttttaaaataaataaataaaataaaatattttttaaaaaagatgatggagttaattggatttaaattgaagttttaaaaagatgaagagttagagatttttaaggataaagataaaattagtttgttttttttattaaatttttatttgttggtagattttgatttagagttagagaaagtttaattgtttaagttttattatttttaaagttttggttaagtttttagaaaatttatttttattgagtagtaatgtataaagttaagtatttatattagatttttaaatgtaagagatatattatattttgaagtttattttgggtatgattttattaaattaaaatattatggaatttattgttatagttgaaatgttttttgtgtttttaaatatattagttaaattttaaaaataaaataaaaaaatatggtttgtttttataattataatataggatggggttgtgttggaaatggatattattaggaaagtttgttttatgattttaaatattttaattattttttttagttttttattttagtaatatatagagtaagaaaaattttatatataatagtgattgataaattggggaggtggaagtaataaaaaggatttattaattatttgaaaatgatttatattttaagttaaatttttattataatttttaatttatataaatttttttttttttttatatgttaaaataaatatatttaattttaatgtgttgaagtttataaattattatataaagattttataagtgattaaaaatagtttagattagtagataaaaatattttatagttataataaaattataagtatttttaagtatttaaaagttagaattttgatattaattttaaaataaaattaataaaatttgttttatgttttttgaaaaagttttgtttaataaaaatattaaaaattagttttttaattaatgtttaatgtaataaaggattttggaaatatgaatttagaaaatttttgtataagagttttaatttataaatatgttatttaattgttttttttttaaatataagattatattagttttttattgtttttattatttttaaaagaatatttagtatattattatttagtaaagtgttttatgtgtttgttttattttttattattttatagagaatagtgttttaatttttgaatttaattataaaaagtgaaaaaagataggaaaatgatttgttgaaagttatgtttagaatagaaataataaatgttagatgaaaaaggtttttttaatagagagttttttgtatataattttttttaaaattaaatatttattattagtttttaatttataatgtgtgttttgtttgatgaattggattgaaaaaaattaaataaaatgtgtaataaaaaaatgaatattataaattataatagaagtttgtttatgtagtattatttttggatttggtagaatataggatagaaatatatttggttttgtagttataagttaaagtggtaaagaaaaaaatagaaataatatattatatgaaatagatattttttaaattattaaaggttatagatatttatttaaagtattttttaaatttttttaattgttgtttttaggtatattttgaggtttttaagtttattttggggtaagttaaaaagtttatttaaaataaagtattttaagtaagaataaaatgatgtagttggttttagaatatattggaaataaaaattgttgtttttaaaatttgaaataagaaatgatatgtttttagtaaatttgatttttatgtgtaggggggagggggtattgttttgataatttattaattatattgtatatttattttatttgaaagtttaatgaaattttttaagttgggttatttagggattgaatttttattttaagagatttaatttagtttataaattaaagaatatttttaaatggtttattttttttttgattaaatttttttttttgggtgatagaatgtttttaagaatattaatatatttttttgtgatttttttttaaatataggatataggaagaattgaggttattagttttagataagtgggtgatgattgttgttattttatgggtggtttttttgtagaatggggttggttaggattggtgtgttgggtaaagaataatatatgagtttagttgtaaataatataattttttatgagtttgtgtggtgggttttggtggtggagaggattttggaatttgttattgggtaggggttgggggaggaatggtgagtaggatgagtgttgaatgaggatggtgagattgttagttttgttgtggttgtttgtattggtgtttgttgagtagattggagggatgtagttattagtttgggttttattgtttttattaggtgatgtggatgttttgattttgtttttttgggaggtgatttttgttttttggggttgttagggtggtggggggtggggaaggttttgttggaggtttgggagtttttttggtttgttattgaagggaaagtggttggggtgtgggggataatagggagtggggagtgtggtttgttagagtggtgttgttggttggttgggttgattgatgtgtatgttgtgaggtgtgattgggttttgtttggtttggttgttgttttgttgtggttgtggtgtttttggtgtttgtagttgtgttttattttttatttttgttgtttaggagaggagtagaattaatatttttagtaatattattttttgttgttgttgttgttgttgttgtttttttatgggttaatagtagtatattgatttggagggagaagttgaaggggtttggtttggagtttttatgggaagttgggattttttttggtaggagaaatggtgaagtattttttttttgttttattttaggggttggtaatgtttttagtttttttaaaatagggattttttttttttttgtttgtttttttttttttttttttgtttttttttttttgtttgttttttttttttttttttttttttttgaaatttagatttttgtttttttttttattatgtgatgtgtgggtatttaattggtatgtggagttgtgtttttattttttgtttttatttgttttttaggtgttttaggggtgtgtgtatgtgtgtgggggatggtttttgtgttgttaggtttgttgttgttttttgtttgttggtggagagttgggattgggtttgggaggtggggtttgttttggttttgttttggggtgggagtgtttttatgtggagatagtgttttgttatgtgttagagttgttgaggatttttttttgggttaaaatggtttgtggaagatgtaagtagggttgtttttgattttttaatgttataagtaatagaggtttttttttttttttttttgttttttttggtgtattatagttattaagtaaataaaaagttttaataagtagtaattatagtggtagttgttttagtgatgtgaatataaatgtaaagatttttaagtagtaggaaaaaaagatattatgtttgagatgtaattttttgagttttttataaatttatgttatagattaaggttttagtttttgtaaaagtatgtaatttgaattagattgttttgaatttttagtttagaaaatgtttttttttttttttgttatatttttgaagtgaatttatgtatattttttttttaattttttaaagtttgtgtttgtttttttgtaatttattttgattttttaaatttggatgttatgaattagaattttttatggttatttaattagatattttttatttatttggtattgtgtttgagtaggttgaattagggagagtgtgtgtgtgtgtgtgtgtgtgtgtgtatgtgtaaattgttttgttttgttttttaaagataaggtttttgttgttttgttaggttgaagtgtagtggtgtgattatagtttattgtaatttttaatttaagttgaattagggagagtgtgtgtgtgtgtgtgtgtgtgtaaattgttttgttttgttttttaaagataaggtatttgttgttttgttaggttgaagtgtagtggtgtgattatagtttattgtaatttttaatttaagtgatttttttgttttggttttttataagtgttgggattataggtgtgagttattgtgtttggttttaatgttattgatattgtaataaattggaatttttatattgttatttgtatattttatattatttattattattaatataagtgaagagaatttttttttttttgagatggagttttgtttttgttgtttaggttggggtgtaatggtgtgattttgatttattgtaatttttgttttttaggtttaagtgatttttttgttttagttttttaagttgttgagattataggtatgtattattatgtttagtaaattttttgtatttttaatagagatggggttttattatgttggttaggttggttttgaatttttaattttaggtgatttgtttgttagttttttaaagtgttgggattataggtgggagttattgagtttggttataagagttttttttaatttttagtttgagaaatgaatgattttagttttgttgtaatattaataggtttaaaaatggatgttttaaaattattataattgtatttatttataatgagatatatggaattattaaaggatggtagaattttatgaatggttttttttttttttattaaaatatttagttttaggaaatagttatttgtagatattatattttatattatttgtgttttttattaattttttgtggtagtgttgttaataaatgatatttttattttttagtttttaaattattttatagtatgttttttgttgtatagtatttttataatgaattttagtgattagaggtaaatggtatttttttttaaaatttaattggaaaaaattttaaagttatattttgtattattaagatgattattgaaaattatatttataaagattgtatttttttttttaatttttaaaatgtatttattttggttagttatggggtttatagttgtaattttagtattttgggaggttaaggtttgtagattatttgaggttaggagtttgagattagtttggttgatatggtgaaattttgtttttgttaaaaatataaaaattagttaggtgtgatggtgggtgtttgtagttttagttatttgggaggttgaggtaggagaatggtgtgaatttgggatgtagagtttgtagtgagttgaggttgtgttattgtattttagtttgagtgatagagttaggaaaaaaaaaaaagttgggtgtggtg

SEQ ID NO: 715 - DNA, 6112 bp, Artificial Sequence
  chemically treated genomic DNA (Homo sapiens)
tattatgtttggttttttttttttttttagttttgttgtttaggttggagtgtagtggtgtgattttggtttattgtaagttttgtgttttgggtttatgttatttttttgttttagttttttgagtagttgggattataggtgtttgttattatgtttggttaatttttgtatttttagtagagatggagttttattatgttggttaggttggttttaaatttttgattttaagtgatttgtggattttggttttttaaagtgttgggattatagttgtgagttttgtggttggttaaaataaatatattttaaaaattaaaaaaaaaaatatagtttttataaatgtaatttttagtaattattttagtaatgtaaaatatggttttggagttttttttagttgaattttaagggaaagtgttatttgtttttaattattggaatttattataaaaatattgtgtaatagaaaatatgttataaggtggtttaagagttggaaaataaaaatattatttgttgatagtattattataagagattagtaaaaagtataggtgatatgagatgtaatgtttgtaggtaattattttttaagattgaatattttaatgaaggaaaaaaaaattatttgtgagattttgttattttttgatgattttatgtattttattataaatggatataattatgatggttttgaaatgtttgtttttgagtttattaatgttgtagtaaaattagaattatttattttttaaattgagaattaaagaagatttttatggttaggtttggtggtttttatttgtaattttagtattttgggaggttggtgggtggattatttgaggttgggagtttgagattagtttaattaatatggtgagattttgtttttattaaaaatataaaaaatttgttgggtgtggtggtgtatgtttgtaattttagtaatttgggaggttgaggtaggagaattgtttgaatttgggaggtagaggttgtggtgagttgagattatattattgtattttagtttgggtaatgagagtgaaattttgttttaaaaaaaaaaaaattttttttatttatgttaatggtaataaatggtataaaatatataggtaatagtataggaattttagtttattatagtattaataatattaaggttgagtgtagtggtttatgtttgtaattttagtatttgtgggaggttgaggtgggaggattgtttgagttggaggttatagtgagttatgattatattattgtattttagtttggtgagatagtggatattttgtttttagaaagtaaaataaaataatttatatatatatatatatatatatattttttttaatttggtttgagttggaggttatagtgagttatgattatattattgtattttagtttggtgagatagtggagattttgtttttagaaagtaaaataaaataatttatatatatatatatatatatatgtatatatatattttttttaatttggtttatttaagtatgatattaaatagatgaagaatatttaattaaatggttataaaaagttttagtttatgatatttaagtttaaagaattaaaatgagttatgagaaaataaatataagttttaagaagttggggagaagatgtgtgtggatttgttttaaagatgtgatagagagaaaagaggatattttttggattggagatttaagatagtttggtttaggttgtatgtttttgtaaaggttaaagttttagtttgtgatataaatttgtaaagagtttggaaaattatattttggatatggtgttttttttttttgttgtttgaaggtttttgtatttatgtttgtattattggggtagttgttgttataattattgtttgttgggattttttgtttatttggtagttgtggtgtattaagagaggtagaaaaagaagaaaaaaaatttttgttatttgtgatgttaagaagttgaaagtagttttgtttatattttttatggattattttagtttaagggaaggtttttagtagttttaatatgtagtggagtattatttttgtgtaggagtgtttttgttttggggtgggattaggataaattttgttttttaagtttaattttagttttttgttggtggataggaagtggtggtaggtttagtagtatgggaattgttttttgtgtgtatgtgtgtgtttttgaagtgtttgggggatgggtaggggtgggaggtaggggtgtggttttgtgtgttagttgggtgtttgtgtgttatgtggtgaggaaggaggtggaggtttgagttttgaaggagggggggagagaagagggaatgagtaagggaaggaaagtggggaaaggaggaaggaaatgaatgagggggagggaggtttttgttttggaggagttaggagtgttgttggtttttgaagtggagtgagagggaggtgttttgttgttttttttgttaggggaggttttggttttttgtggaggttttggattaagtttttttagtttttttttttggattgatgtgttgttgttaatttgtgaggaggtggtggtggtggtagtggtagtggaagatggtgttgttgagagtgttaattttgttttttttttgggtggtggggatgggaggtgaggtatgattgtgagtgttgggggtgttgtgattatggtggagtggtggttgggttgagtggagtttagttgtgttttgtggtgtgtgtgttagttagtttagttggttagtggtgttattttggtgggttgtgttttttgttttttattgttttttgtgttttgattgttttttttttggtggtgggttgaggaggtttttaagtttttggtgaggttttttttgttttttattgttttggtggttttgggaggtgggggttgttttttagagaagtgaagttggggtatttgtgttgtttggtgagagtggtggaatttaggttggtggttgtatttttttagtttgtttggtgggtgttggtgtaggtagttgtagtgaggttggtggttttgttgtttttgtttagtgtttattttgtttattattttttttttagtttttgtttggtggtggattttgaagttttttttgttgttgagatttgttgtgtagatttgtgggaagttgtgttgtttgtagttgggtttgtgtattgttttttatttggtgtgttggttttgattgattttattttgtagaggggttgtttgtggagtggtagtagttattatttgtttatttgagattagtggttttggttttttttgtgttttgtgtttggagagagattataggagggtgtgttggtgtttttgaaaatattttgttgtttaggggaaagggtttggttgggagaagggtaaattatttggggatgttttttgatttgtaggttggattgggttttttagagtagaagtttggtttttgggtgatttaatttgaagagttttgttaaatttttaggtggagtagatgtatagtgtagttagtggattgttaaaatagtgtttttttttttttgtatatgaaagttaaatttgttaaaagtatgttattttttgttttgggttttgaagataatgatttttatttttggtgtgttttaggattagttgtattattttatttttgtttaaagtgttttattttaggtaagttttttgatttgttttagagtaaatttaaaaattttaaggtgtgtttaaaagtaatgattgaaaaaatttgaggaatgttttggatgagtgtttgtagtttttgataatttagaaaatatttattttatgtaatgtattgtttttgtttttttttttgttattttgatttatgattgtaggattaagtgtatttttgttttgtattttattgagtttgagggtggtattgtgtaggtagatttttgttatagtttgtagtgtttatttttttgttatatgttttatttaattttttttaatttaatttattaagtaagatatatattatagattaagagttgataatagatgtttagttttaaaaaggattatgtgtgggagattttttgttagaggagttttttttatttgatatttgttatttttgttttaaatgtggtttttaataaattgtttttttatttttttttattttttgtgattaaatttaggagttaagatattgttttttataaggtaataaaaagtaagataaatatatgaggtattttattgagtagtagtatattaaatgtttttttaaaaataatgaaaatagtaagaaattgatgtagttttatatttgaagaaaaaataattgaataatatgtttgtgggttaaaatttttatataaaaattttttaaatttatatttttagagttttttattgtattaagtattggttaaaaggttaatttttggtgtttttgttaagtagaatttttttaaaaaatataagataagttttattagttttattttaaaattagtattaagattttagtttttgggtatttggagatatttgtaattttattgtaattatggggtatttttatttattaatttgagttatttttggttatttgtaagatttttgtatgatgatttgtagattttagtatattgagattgaatgtatttgttttagtatatgagagaaaggagaaatttgtgtagattagaagttgtggtggaaatttaatttaaaatgtaaattatttttaggtagttaataaattttttttgttgtttttatttttttaatttgttagttattgttgtgtgtgaaattttttttgttttgtatattattaggatgggaagttggaaggaataattaaagtgtttagaattataaaataaatttttttaatggtgtttatttttagtatagttttattttatgttgtagttgtaggagtaaattatgtttttttattttatttttaaaatttaattggtgtgtttgagagtataaaaggtattttagttgtagtagtaaattttataatgttttggtttgatgaaattatgtttgaaatgaattttagagtatgatatgttttttatatttaaaaatttgatgtaagtgtttagttttgtatattattgtttaatagaaataagttttttggaaatttgattagagttttaaaggtagtagagtttaagtagttaaattttttttgattttgagttggaatttattagtaaataagaatttaatgaaagagatagattaattttgtttttatttttaaggatttttgattttttatttttttaaaattttagtttgagtttagttaattttattattttttttaaaaaatgttttattttgtttatttattttaaaaagtagtgatggggttttaatatgttgtttaggttggttttaaattttttgtttttagtgatttatttattttggttttttaaagtgttgggattgtaggtatgagttattttgattggttaattttttgttttaagatattttttttaataagaaaaatttatatattatatattattaggatgggaagttagaaggaagaattaaagtgtttagaattataaaatgtaaatttttttgatggtgtttatttttggtatagttttattttatgttgtagttgtaggaaggtattattgtttatattaatggtattttttgtgtgtatgtgtatagttttttttagtaggtatggtaggtatttttttgatgtgtttttagtaatttgtttaagatttttaaggatgtgtattatttgatttttttaaaatttttttaaggattttaagggttgtagggtttggggtaaatggaatatttttatgatgttttttgtgtgtttaatattgtgttaggagttttattttttaatagttatgagagaggggtgataggtagttgaagaaatagatttggaaatataatttttttagtattatttattatttagtggtgaattggatatttgaatttaagttggtttgattttaaattttaataagttttttatttattgtttttttatgttttttttgaaagtggtttt

SEQ ID NO: 716 - DNA, 6223 bp, Artificial Sequence
  chemically treated genomic DNA (Homo sapiens)
gttattagaattatgaaggatgtagttagttgggttatagtttttgaaaagatgatatttatgttttagaatttgtgattaggattttattttttttttaaatggttttttgtagatgtaattttttttttttaagagatggagttttgttttgttatttaggttgtagtgtagtggtgtgattttggtttattgtaatttttattttttggggtttaagtaattttttgttttagttttttgtgtagttgggagtataggtatatgttattaggtttggttatgtagatgtaattaaatgagagatgttaagatgagattattttgaattatttatttgggttttaaatttagtgataagtgtttatataagagaatggtttataattgtaattttaatattttgggaggttaagataggataattattttaagttagaagtttaagattagtttgagtaatatagggagattttttttttataaaaaaaaattaaaaattataattgggtatggtggtaggagtttgtaattttagttattttggaggttgaggtaggagaattgtttgaatttaggaggtggaggttgtagtgagttgaaattgtattattgtattttagtttggttgatagagggagattttattttaaaaaaaaataaaaaataaaaaaaataaataggttaggtgtagtggtttatgtttgtaattttagtattttgggagattgaggtgggtggattatgaggttaggagtttaagattagtttggttaatatggtgaaattttgttgttattaaaaatataaaaattagttgggtgtggtggtgtatttgtgtagtttttgttatttaggaggttgagatagaagaattgtttgaatttgggaggtggaggttgtagtaagttgagattgtgttattgtattttagtttgggtgatagagagagattttatttaaaaaataaaaataaaagattagttggttgtggtggtttatatttgtagttttagttttttgggaggttgaggtgggaggattgttttagtttgggagttgaaggttgtagtgaattaagattgtattattgtattttagtttgggtgatagagtaagattttgttttaaaaaaagagagaggtagttaaaaggagatttgggtgggagaaggaagagaagaagatagagatagggattggagtgagatagttattagttgagaaatgtttggagttattagaagttgtaagagttagtttttttttgggtttttatggagaggtttagttttgttgatattttgattttagatttttaatttttagaattttaagagaataaattattattgtttaagttatttagtttatggtaatttgttagagtagttgtaggaagttaaattatagggttaagggggatagaatgatggggttaaggaggtggaattttatttttatagatatatgaaggtaaggagggggttatggggttttttggggaatggtattttaggtagagggaatagtaaatgaaaagttttagatttatgtttaagtgtggtggtttatgtttgtaattttaatattttgggagattgaggtaggtagattatttgatattaagagtttgagattagtttgattaatatgaagaaattttgtttttattaaaaatataaaaaattagttaagtgtggtggtatatgtttgtaattttagttattttggaggttgaggtaggaaaattgtttgaatttaggagatagaggttgtagtgagttaagattgagttattgtattttagtttgggtaataagagtgatatttgattttaaaaaaaaaaaaaaaaaggaaaaggaaaaaaagaagttttagattttaggatataattatgtaggtatatatagataggtttagaaattatagttatatatatagagggatatattaattggatgttatggtttggttagtatttaagatattaatttatagtattttatgtggaaatgagtaatttttatttatagggatagatagtagggtttttataaatttttaagttttttttttgggatttatatagttttttatgtagggatgggagggtggagggttggggtattgatattattgttggtatttttattttgggggggtggttttttaatttgtagttttttttttaagtttattaaggagtgtgaggaattggaattgggaggggttggttttaagattggaaatttttaaggggtattagtggggttagagggaggggtttagagaagttagagagtttaagttttgttttttgatgttgttaatttttatttttttttatttttttattttttgtttttggtgtggttgttttttttttggtttgttttagatgtttgagattgaatttaataagtggttgatttagtttttagtgttatttgtaagattttttttattttggtttttagtgaaataggttggggtatggttgagtaagtaagggtgtgggtggtgttgggaggggagggtatagtttttgtttttttttttaaggtttgtagggtgattattgtggttttgattgtgtgttgggagggggtgtgttgtgttgggtgttgaggatagttggttttattgttaggtagggtgtgatttgtgtgggtttttttttgatgttttgggtgggtttttatgttttgtgttttgtgtttttgttgattggttgggttggttttagttttagtttgtgttttgttttatggtttaagttttgggggagatggaggggggagtgtagatttagttagggggggtatggtgggtgaggtgaggattaggagatggggatgaggtttatggaaatgtttgttgttggtgggggggttttgggggatttatgggtggggtgatagtttgggggtatttttgaaaggatttgagtatttgagattgtgaaagagatttgtggggggtggagggtgtgtagggagtggtttttatagtttaatttggaggattgagtttgttttattttgggtgatttgggttttgggtgttgtgtgtgttggtgatttatttgttgaagggtggggtagttgtgggtttatttatttgttggtagtattttaggtgtggagttttattgtgtaggtgtttggttttattgtttgtttttttaggtgtgtggttttaggtaaggttatatttttttttattttgttttatttttgtagattttttagttttaggaaatttttttagttaggtttagttttttataaaggtgagtttgagtgggagatttagttaaaataaatgtaggtgtaattttaaagtggttttttttggtttaaaattattttagatttatttagtttgggtttgatttagtatttggtatatatgatgttgaataaatgaatatattaatgagttaattaatggttattgtgtgaattgttgttattaatgatagtatgaaaggagttaagtatttttttataattttgagagatttttttttagagtatttgttttttgtttttttattattattatttataataatgtttatgttgagtatatattatattttgagtatttaatgtatgttgagtgtatataggagttattattgttttattttttagatgtaaaaattgaggtttaaaaagtttgaatgtttaaggtgttttagattttagaatttaagttgagttttttttgtttttgtttagtttttttttagtttttgttttgttttttgtaattttttgtttttttttgtgatatttaataattaaattgttaagtttttttatagttgttagtgaagtattttttattttataggtgtaatgatgattagagagggaaagtgattagtttaaagttatattgtaagtaagtggtagtgtgggattgtattataggttttttatgtttttttttattaaatgttgagagatgggaggggtgtggagggtgtgagttattgtgattggtttttgatagtttgttgattgaataatatttattttatggggggttttatatgtgattttaggtggttaagaattgtgaagttgggattattgggtttattttgtagattatgatattgagatgtaaagagtttaatttttagttggttagtaatatgatgtgggatttgaatttatgttaagaagagtgtagagtttttgtttagtttttaatggggaaatatgagaggttgtttaagttatatatatgtaggaagtggtagagatatttatggtgaatatagaggtagagggagaagataaattgttttttttttttgtttttatatatagggtttattggtggttttgagttaggtatttataggtaggtagttttttgggagggtagttgggtgtaatgatttttatttgtatatgggtttttgtttaggtaagggggggttgtgtgggggtgaaggaaggtggaggattagttaggtgtttaggaattttaggtttaagtgataaattttttttttttttttattaggtaatagttgtatggggatgggggtgtttttgtgggtgtagggagtttttttatttatagtttttatgttttttttttttttgttttagttttagttgttgaggttgtagttgtttttgttagtttgagttttgggaattataaagtaggggaaggtaggaggaggggttgttttatgttagatgtgggggtttgggaagttgttagagttaagatgtgtagaatggggtgtgttgagataggaagtaagggtgttgagtgttatagggaggtttggggttttatgtttaggtttaggggtaatagaaggggaaggggtaggggattttagggttatgggtttttttttttttgatgggtatttattttagttaggtaggtttgtgtggtgtttttgggagagggattaaggtatgtatttatgagtgagtatagtatttttagaagtagttagtgttgggtgttgttggaatagggtgtgtgttgaagggaggggtaattggtataaggtatgtgttgttttgtttaatattgttatttttaagggttgtgtttttttagggtgtggtatagtttaattgttttgttagaagggtttagggtgtggttgggtttgagttagtggagaattgtgtgtatgtgattaggtgtggggatatagtgtgtgtgtttatgtatgtttttgttagagagagggtgatggagagaggaaggaagattgagaaaaatataaagatgtgagaatgaattagaagtagatagattaggagaagatagagaaggatagaaagaaatagaaagtggttaggtatggtggtttatgtttttaattttaatattttgggaggttgaggttggtggattatttgaggttaggagtttgagattagtttggttaatatagtgaaatttagtttgttttaaaaatataaaatttagttgggtatggtagtaggtgtttgtaattttagttatttaggaggttgaggtaggagaattgtttgaatttaggagttagaggttttagtgagttgagattatgttattgtattttattttgggtaataagagttaaattttatttttaaaaaaaaattagttgggtgtggtggtgtatgtttgtagttttagttatttgggaggttgaggtaggagaattgtttgaatttgggaagtggaggttgtagtgatttgagattgtgttattgtatgttagtttggtaatagagtgagattgttttaaaaaaaaaaaagagagagagaaggatagaaagaaatagaaaataagagggtgagttatagaatttgttgagttgaatttgagtatgggtttatatagtatatgttttttttttataggataagttgattggatattattatttatattaggatttgtgggtgtttgtgaatttatattgtgggttttataatatgggttatgggttattttgagttgtaggtaatgtgagttatatgtgtgtgtgtgtatgggtttgtgtgtttgtatgtggatttgggtatgtatttattgtgttttagttgtagttatatgtgagtttatttgtatatgtatgttagtgtgggtgtgtttgtgtgtgtatgagttgtatatttatatgggaatgtatagatgtgtgtgttgtttgtatgtaggttgtgtttgttgtgtgttt

SEQ ID NO: 717 - DNA, 6223 bp, Artificial Sequence
  chemically treated genomic DNA (Homo sapiens)
agatgtataatagatataatttgtatatagatagtatatatatttgtgtatttttgtatgggtgtgtagtttatatatatatgggtatatttatgttgatatgtatgtatagatagatttatatgtagttgtaattgagatataatagatgtatgtttaaatttatatatagatatataagtttgtgtatgtatatatatgtggtttatattgtttatagtttagggtggtttatagtttatgttatgggatttatagtgtgagtttatgaatatttataggttttggtgtgggtgatggtgtttagttggtttgttttgtgaggaaggggtatatattatgtaggtttatgtttaggtttagtttgatagattttgtaatttatttttttgttttttatttttttttgttttttttttttttttttttttttttgagatagttttattttgttgttaggttggtatgtagtggtgtaattttgggttattgtaatttttgttttttaggtttaagtgatttttttgttttagttttttgagtagttgggattataggtgtgtgttattatatttagttaatttttttttggagatggagtttggtttttgttgtttagggtggagtgtaatggtgtgattttggtttattggaatttttggtttttgggtttaagtgatttttttgttttagttttttgagtagttaggattataggtatttgttattatgtttagttaagttttatatttttagaatagattgggttttattgtgttggttaggttggttttgaatttttgattttaggtgatttattagttttggttttttaaagtgttgggattagaggtgtgagttattatgtttggttgttttttatttttttttgtttttttttgtttttttttggtttatttgtttttagtttatttttatgtttttgtgttttttttgatttttttttttttttttattattttttttttgataagagtatgtatggatatatgtattgtgtttttatatttgattgtatgtatatagttttttattagtttagatttagttatattttggatttttttggtaggatagttagattatgttatattttagagggatatagtttttagggatggtgatgttggatagggtagtatatgttttgtgttagttgtttttttttttaatatatattttattttagtaatgtttagtgttggttgtttttggagatgttgtgtttatttgtgggtatatgttttggttttttttttaagagtattatgtaggtttgtttggttggagtagatgtttattagggaaaggaagatttgtggttttaggattttttgttttttttttttttattatttttgaatttgggtatgaagttttagatttttttgtaatatttagtatttttattttttgttttagtatattttattttgtatattttagttttggtagttttttgagtttttatatttggtataagatagtttttttttttgtttttttttgttttgtggtttttagggtttgagttggtagggatagttgtagttttaatagttggggttggggtggggggggggggggtgtgggaattgtggatggggggattttttgtatttgtagagatgtttttatttttatgtagttgttgtttggtggagggagggagggggtttgttatttgggtttggggtttttgggtatttggttgattttttatttttttttatttttatatagtttttttttgtttggatggaagtttgtgtgtaaatggaggttgttgtatttagttgtttttttgggaggttgtttgtttgtgagtgtttggtttagagttattagtgggttttgtgtgtgggggtgggggggaggggtgatttgttttttttttttgtttttgtgtttattatggatgtttttattattttttatatgtgtgtggtttgggtaattttttgtgtttttttattggaaattgagtaggggttttgtattttttttggtatgggtttaagttttatattatgttgttgattggttaggaattaaattttttatattttagtgttatggtttgtaaaatgggtttagtaattttagttttatagtttttggttatttgaggttatatgtaaagttttttatgaggtaggtattatttaattaataaattattagggattaattgtagtggtttatattttttatattttttttattttttaatatttagtggagggggatataggaggtttataatatagttttatattgttatttatttgtagtgtgattttgggttagttattttttttttttgattattattgtatttgtgaaatagggaatgttttattggtgattgtgaagggatttaataatttagttgttagatattataaggaaaggtaagaggttgtagggagtagagtagaggttgggaaggagttgagtagagatagaaagagtttagtttaaattttggggtttgggatattttgagtatttaagttttttgagttttagtttttgtatttggaaaatggggtaataataatttttgtatgtatttaatatatattaagtgtttagaatatagtatgtgtttaatataggtattattataaataataatggtagggaggtaggaaataggtgttttaaggagaagttttttaaggttatgaggaaatgtttggttttttttatgttattattaataatagtagtttatgtagtagttattgattgatttattaatgtatttatttatttagtattatgtgtgttaagtattgggttaggtttaagttgggtgggtttggggtgattttagattaagaagagttgttttgaagttatatttatatttattttggttggattttttatttgggtttatttttgtggagggttgagtttgattgagagggttttttggggttggggggtttgtgaaggtggggtgggatggggaaaagtgtgattttatttggagttatatatttgggagggtgagtggtggggttgggtgtttgtgtagtggagttttgtgtttggaatattgttgataggtgaatgagtttgtggttgttttgttttttgataggtgaattattggtgtgtgtggtgtttggagtttggattgtttggagtggagtgggtttagttttttgagttgggttgtgggaattattttttatatgttttttattttttatgagttttttttatggttttaaatatttaagtttttttaaggatgtttttaagttgttattttatttatggattttttaagatttttttattggtagtagatgtttttatagattttgtttttattttttagtttttgttttatttgttgtgttttttttaattaggtttgtgtttttttttttgttttttttaaagtttaggttgtggggtggggtgtgggttggggttggaattggtttgattggttggtgggggtgtgggatgtagagtgtgggaatttgtttggggtgttgggagggggtttgtgtgggttgtgttttgtttggtggtgggattagttatttttggtgtttagtgtagtgtgtttttttttgatgtgtggttggggttgtagtggttgttttgtgggttttggaggaggggatgggagttgtgttttttttttttaatgttatttgtatttttgtttgtttggttgtgttttgatttgttttgttgggggttggggtgggggggattttgtgggtgatgttaaggattgagttagttgtttgttgagtttagttttaggtgtttgggataagttggagggaggataattgtgttaggggtggagggtggggggatagaggggggtgagggttggtagtgttggggggtggagtttggattttttggtttttttaagtttttttttttgattttgttagtgttttttggagatttttagttttaagattaattttttttagttttaattttttatattttttggtgggtttggggagggggttgtaggttgaaggattatttttttaagatgagggtattaatagtggtgttagtattttaattttttatttttttatttttgtataagaggttatataagttttagagaagggatttgagggtttgtgggagttttgttgtttgtttttgtgagtgagagttgtttatttttgtgtgggatgttgtgggttggtgttttgagtgttggttaggttatggtgtttaattggtgtgtttttttgtgtgtgtagttgtggtttttgggtttgtttgtgtgtgtttgtgtggttgtgttttggggtttgagattttttttttttttttttttttttttttttttttttgagattgagtattgtttttgttgtttaggttggagtgtagtggtttgattttggtttattgtagtttttattttttgggtttaagtgatttttttgttttagtttttggagtagttgggattataggtatgtgttattatatttggttgattttttgtgtttttagtagagatggagtttttttatgttggttaggttggttttgaatttttgatgttaggtgatttatttgttttggttttttaaagtgttgggattataggtgtgagttattgtgtttggatatgggtttgagattttttatttgttgttttttttgtttggaatgttgttttttagaaagttttatggttttttttttatttttatatgtttgtgaaaatagaattttatttttttgattttattattttattttttttaattttgtggtttagttttttatggttgttttaataaattattataaattgggtagtttgaataatagtaatttatttttttgaagttttggaggttggaagtttgaaattaagatattggtagggttgagtttttttatggggatttaggggagaattgatttttgtagtttttggtggttttagatgttttttagttagtggttgttttattttagtttttgtttttgtttttttttttttttttttttatttaaatttttttttggttgtttttttttttttttgagatagagttttgttttgttatttaggttggagtgtagtggtgtaattttagtttattgtagtttttaatttttaggttgaagtgatttttttattttagttttttaagaagttgggattataggtgtgagttattatggttagttaattttttatttttattttttaggtggagtttttttttgttatttaggttggagtgtagtggtatgattttggtttattgtaatttttgttttttaggtttaagtaatttttttgttttagttttttgagtagtggggattatatgagtgtattattatgtttagttaatttttgtatttttagtagtgatgaggttttattatattggttaggttggttttgaatttttgattttgtgatttgtttattttagttttttagagtgttgggattataggtatgagttattgtgtttggtttgtttgttttttttgttttttgtttttttttgagatggagtttttttttgttaattaggttggagtgtagtggtgtaattttggtttattgtaatttttgttttttgggtttaagtgatttttttgttttagtttttagagtagttgggattataggtttttgttattatgtttggttataatttttaatttttttttgtggaaaaaaagtttttttatgttgtttaagttgattttgaatttttggtttgaagtgattattttgttttgattttttaaagtgttgggattatagttgtgagttgtttttttgtatgaatatttgttattgaatttagggtttaggtggataatttagaataattttattttgatattttttatttaattatatttgtatagttaggtttggtggtgtgtgtttgtatttttagttatgtaggaggttgagataaagaattgtttgaattttgggaggtggaggttgtagtgagttaagattgtgttattgtattgtagtttgggtgatagagtaagattttgttttttaaaaaaaaaaaattatatttgtaaagagttatttaaaaaaaaagtaaggttttagttataggttttgggatatggatgttatttttttaggggttgtgatttaattgattatattttttatggttttgatggt

SEQ ID NO: 718 - DNA, 6195 bp, Artificial Sequence
  chemically treated genomic DNA (Homo sapiens)
ttattaaatttaatttgaaatgtttttaattttaaattaaagggaattgagtagtataatttttggggtttgttaattttagttttttagttagttgatgttgttggttaaatttttgttttttttgaagggtaatttgggtttttatagtttttagggttgggtaattatatttgtaattttttaaagttttgtttgttataaattgtatgagttaatggaaagattaagtatttttgttggtataatttttttaggggatttttaaggttttaatagtaggttttatgttaatttttgtttagtaagaaagtttagttaatttttagtaatttttttttttaggaagttgattttgtggttattgggaataagatatttggtgattttattttagaaatgtaagtaaatttttaattagtatttataagtagaaatttatataatttttaggataattattttttgagaattgagttaaagtttattgttttatttgttgatttttaagtgagataaagtatattagaagttagtatgttaggtgtttttatgagttttgaaaatttaatattaatttatataggggttatagaaattataaatatttgttaaggggttagttttagttattttataaatatttttttttaaattgttttaaattatatttttattagattttattttataatttttagtataagggttttgatattattattattaatttttatttatttatgtatttagagatagggttttattttgtgttattgtattttagtttgtgtaataattatagtttattgttgttttaaatttttgagatttttttgttatagttttttaagtagttggaattataagtataagttattatatttagttaatttttaaattttttgtagagatagggttttattatgttgtttaggttggttttgattttttggttttaagtaatttttttgttttggttttttaagtagttgggatttataggtgtatattattatgtttaggtaattaaataatttttttttgtagagatggggattttattatgttatttaggttggttttttgattttttggttttaagtaatttttttgttttagttttttaaagtgttgggattataggtatgatattattaatttattaaaaatttatatagaggtttttttttttaatatattttataaagttaatttgttggtttttttattattaattgattatttaataaaaagaagattaatttaaaaaatatttagtatttaaggtttatttatttttagaattttatatatgtaaaattgaatattatagtttgttaatgtttggtataattgttgttaaagataaatgtttgagttatgaaataatgttgatagaaaggtattttttatttttatttatagtaatttaaattaagatttggtttatttattgttgttttaagatttgtttatttattgttttttatttttttaatattatattaattttaaagagatattttgggtttttaatttttaaaaatgaagaattatttaaatatatattgtggaagttataatttattgttagaaatatattgatttagatatgttaatatgtattgatatttatttataatttagtttgttttttatgtatttttagatttttttaaaagaggtattttggtaaatatattgtttttttagtagggaattaatttatttttgttttatatagttggttttgtagattattagtgggtatgtagatggtatgatattaaatttgttgagttaatttaataaaattatttttgttttaattggaaagtaaattttgaataattgttatgtattttttttagtttttaaagagttgtagaatgttttttatatggatatattttttttttttttttttttttttgagatagggtttttattttgttgtttaggttggagtgttgtgttgtaattataatttattgtaattttaaatttttgggtttaagtgatttttttattttagtttttttagtagttaggattataggtgaaagttattatgtttagttataggtatgtttttttaatggttagtaatgttttttgataaagttttttttgaaattattattttgattttaaagtagtttttttttttttttttttatttttgtaatagaatttattaatttattaatatataatattttggatattggattggtggaaaggtaaattgaagatttttatttttattttaaaagagtagttatatttttttgtaaaattggaattgtgtgaaataagtaggttattggatagattggaattttgagatattttttatagaggtttgtgttatggtagaatttgatattatttttttttgatttttgttttttaagatttatagtttatagtttatgaggaattttaagaaataagtagtttttatttttatatatataatatatttttttttgaatattattgtttaaagtgaattgttatatggttagattttaagtgaatgtgtgttattgtttttattaggttggatattagtagaaattgttaattaagtagtgagaagttaatgtgttggttattaaaaagaatattaaataaatgggtaaaatattaagatgtagaaagtgggtattgtttatataggagtttttttattttaaaatttgtattgtaaggatgaaaagttttttaaaaataaatgtgaagtaagtttttttaatagtattatttttaaaggttatgtggtttaaaaatttattagtttgaaatagttggttatatattatattttgaagtttgtgttgtttatgtgtttaaaaattaaggtgggggtttgtgattaggggaaaagaataaaaataaaaatatatattagtaatagttttgatagttttaatggggataatgtttgtggatgttgtgtggtgaaatttggtagtttttgttttagtagtaagaaattttttattgttataagttttttttgttttgattattattgtatttaggttatttttgggatggattttaaatagaagatatggagttgaagttttattaggttttaggtagtttgataatgtgtttattgtttattggtattggatttgagtttgtaaaatggattaatatattttagtttttagtgttattagttttttagtttagaagaataagaaatagtttgtgggtggaggtttttttgaaagaaagatttaagttagttaaatggtatatttgattaagtatttttaaagtaggatttaatgatgagggttgggggagggaataaaaagaggttagttgtgttttaggttaaatattattttagttttggtgggttttgttaatatttattatatttattatagggttttttataatgtttgttagtgtgatgatgttgggatttttttttaaattttttaaaatttttattttatgtttaattttttttttttttattggttgaaaggggaaaagtatattagtaaaaaaaaaaaaaaaaaatttttttagagtattttaatatgtagtgtaatatataaatgataaatggtttatttatgagtatattttgaaggaagaaaatgtgttatatttgtttttgaattttttttttagtattgtgttaggtattttgtaggtatttataaatgttgaattgaaagaaaaaaagatttttattttaaagattagatatttttgtagaattagtattttaattattagttttgatgttaatgttttaaaatatgttaaatatgttaatgttttaaaattttataaagtagtaatttaaattgttagtaatattaaagtatattaaattttttattaattaggatgaaatatgggttttttttatttttttttttaattagggttaataataaggatggttaaaatatttttgtgtagtataattttgagggtaaagggtgagttttggagttataatgtttaatgtgaaatttatttttattatttgttggttgttaatggtaaattatataatttttttaagttttttattaagtgtaaaatgagtaataagagtatttattttataagattgttgtaagaattaaatgaggtatttgaaagattttggaatatggttgaaatataatataataataattgtttagtttgattattaatgtttttttttttttttttttttttttgagatagagttttgttttgttatttaggttggagtgtagtggtgtaattttggtttattgtaatttttgttttttgggtttatgttatttttttgttttagttttttgagtagttgggattataggtatttgttattaggttaggttaatttttgtatttttagtagagatggggttttattgtgttagttaggatggttttgattttttgattttgtgatttgtttgttttggttttttaaagtgttaatatttttataaatgaatttttttattttaaagagtattttgtagagtatattttaaatatttttttgtttttatttattttttttatatttgttttagtatggaattttttttatttttttttgaggagggttttggttttattgtattttttttataaagtttttttttttttttgagatagagttttgttttgttgtttaggttggagtgtagtagtatgattttagtttattgtaatttttgttttttgggtttaagtaatttttttgttttagttttttgagtagttgggattataggtgttagttattatgtttagttaatttttgtatttttagtagagatagggttttattatgttggttaggattgttttgaatttttgattttatgatttgtttgttttggttttttaaagtgttgggattataggtatgagttattgtgtttgggtttatattataaagtttttttttgaatagtttaaaatagtgttggtttaaaggaaatataatataaattatatgtgtaattttaaatgtgttagtagttatattaagaaaattttaaaaaggataaaattaatgtattttattaatttaaaattttaatatataaattaatataaaaattattaatttattttatttttttttgtattaaatttttgaaatttaatgtattttatttttatagtatattttaatttagtttagttatattttaagtgtttaatagttttatgtggtttgtgtgtttgttgtattggattgtgtaggtttttttttagggtgttggttattttagattagatgtattgtatataatttttagaagttaagtatattttatttttttattaataagattggtggttattaaagtttgatgattaataattatttggatttttttaatatatagatttatagaatttattaagatttattaaattaaaattttgagagggaaatgggggatttatttttagatattttttaggttgatgatttaggtttagaaattattaaataatattataaatttttttaattttgttttaagttttaagtatatgatagtagaaagtaagtagattttggaaatattgatagtttttaaaatttggttttgtggttgtgtagtgtttagaaaagtatttaaatgttttttattgttgaaagggattatatttgtttgttagtgatttatatattatagttagaataggtttaatgtaaagtggtatttaataaatagaagttattttattaatgatttttatgtagtttattgaatttaatttatgattttttatttaatataatatttatttaagaaataagataatataagttttttttttttgttttaattatttagatttttataaattgttatattatttgggagatttttttattttgtagagattaatttaataatttattttttgttttttattaatttaattgttggttttttagtggaaaaaaaaagtttttggttgataaaattattttatagaatgttttaaatttataaatttaaaaagttggtttgtgatagattaggtagttgatttaggtttgaatttaatgtgattaatgtaatttttgttttattaaataggggagattaaaaattttaaatatggtttataaaggaaatttatttatatttatattatttatttatagttatagta

SEQ ID NO: 719 - DNA, 6195 bp, Artificial Sequence
  chemically treated genomic DNA (Homo sapiens)
tattgtaattgtgggtaggtggtgtaagtatagatgaattttttttgtaaattatatttaaaatttttaattttttttatttaataagataaaagttgtattgattgtattaaatttgggtttgagttagttgtttggtttgttataaattagttttttaagtttatagatttgaagtattttgtagagtagttttgttaattagaagttttttttttttattaaaaaattagtagttgggttaatggaaaataggaggtaagttgttgggttagtttttgtagggtggaaagattttttagataatataatagtttataaagatttgaatagttgaagtaggaagagaagatttatattattttgttttttaggtagatattgtattgggtaagaggttgtgggttgaatttaatggattatatggaagttattagtaaaatagtttttgtttattgggtattattttgtattggatttgttttaattgtggtatgtaaattattaataggtgagtatagttttttttagtagtgagaaatatttaaatgtttttttgaatattgtataattataaagttaggttttgagaattgttaatgtttttaaaatttgtttgttttttgttattatgtgtttgaggtttaagataaagttaaaagaatttatagtattatttggtagtttttggatttggattattagtttggaaagtatttaaaaataaattttttgttttttttttaagattttgatttagtgaattttggtgggttttgtgagtttgtatattaaaaaaatttaggtgattgttggttattaaattttagtaattattaattttgttaatgaagagatgagatgtatttaatttttaagagttatatgtagtgtatttagtttgaggtgattaatattttaggaaaagatttgtatagtttagtatagtaggtatgtaggttatatgaggttgttaagtatttgaaatatggttgggttgaattgagatatgttgtaagagtaaaatatattagattttaagggtttaatataaaaaaaggtaaaatagattaataatttttatattgatttatatgttaagattttagattaataaagtatattaattttgttttttttaaaatttttttgatgtggttattaatatatttaaaattatatatgtggtttgtattatattttttttgggttagtattgttttagattatttaggagaaggttttataatataagtttaggtatagtggtttatgtttataattttagtattttggaaggttaaggtaggtggattatgaggttaggagtttgagatgattttgattaatatgatgaaattttgtttttattaaaaatataaaaattagttgggtatggtggttggtgtttgtaattttagttatttgggaggttgaggtaggagaattgtttgaatttgggaggtggaagttgtagtgagttgagattatgttattatattttagtttgggtgatagagtaagattttgttttaaaaaaaaaaaaaggttttataaaggaggtgtagtgggattaaggttttttttagaaaaaaatgaaaaggattttatattagaatagatgtggaaagaatgggtaaggataaaggaatgtttaagatatgttttgtagaatattttttagaatggaggggtttatttataagagtattggtattttgggaggttgaggtaggtagattatgaggttaggagattgagattattttggttaatatggtgaaattttgtttttattaaaaatataaaaattagtttggtttggtggtgggtgtttgtagttttagttatttgggaggttgaggtaagagaatggtgtgaatttaggaggtggaggttgtagtgagttaagattgtattattgtattttagtttgggtgatagagtaagattttgttttaaaaaaaaaaaaaaaaaaaaaagagtattggtgattaggttagatagttattattatgttatgttttagttatattttgaaattttttgaatattttatttgatttttgtaataattttatgagatgggtatttttgttatttattttatatttaatgaaaggtttagagaggttatgtagtttgttattaatagttagtaggtagtaaaggtaggttttatattgggtattgtgattttaagatttattttttatttttagggttgtgttatataaagatgttttggttatttttgttgttggttttaattagaggaagaaatggaaagggtttatgttttattttaattgataaaaagtttgatatattttagtattattaatgatttaaattgttattttgtaaggttttaagatattaatatgtttaatatgttttaaaatattaatattaagattgatgattgaaatgttaattttgtagaagtgtttggtttttggaatagaaattttttttttttttaatttaatatttgtaagtatttgtagaatatttggtatagtgttaggagaaggatttagagatgaatgtgatatattttttttttttaaggtgtgtttataagtaagttatttattatttatgtattatattatgtgttgaaatattttgaaaaaattttttttttttttttttgttgatgtatttttttttttttagttagtaaaaaagaagaaaattaagtgtgaaataaagattttggagaatttgagaggaggttttaatattattatattggtagatattgtaaaagattttgtggtgagtatagtaggtgttagtaaggtttgttagagttgagatggtgtttgatttggagtataattggtttttttttgtttttttttttaatttttattattaagttttgttttgaaagtgtttaattagatatattatttaattagtttgggttttttttttaaagagatttttatttatagattattttttatttttttaggttaagagattgatagtattggaaattgaaatgtgttaatttattttgtaaatttaggtttgatgttgatgggtgatgggtgtattgttgggttgtttagagtttggtgagattttagttttatgttttttgtttgaaatttattttaaaaatgatttaagtgtggtgatgattagagtggggagggtttgtagtaatagagggttttttattattgaggtgaggattgttaaattttattatgtagtatttgtaaatattgtttttattaaagttgttagggttattgttaatgtgtgtttttgtttttgttttttttttttagttatgaatttttgttttggtttttgaatatgtaaataatatagattttaaggtataatatataattaattgttttgggttagtgggtttttagattatatagtttttggggatgatgttgttagaagagtttgttttgtatttgtttttaaaaagttttttatttttatagtgtaaattttaagatagaagaatttttatataagtagtgtttattttttgtattttgatattttgtttatttgtttaatgttttttttaatgattaatatattgattttttattatttagttgatagtttttgttgatgtttaatttaatgaaggtagtaatatatgtttatttaggatttggttatatggtaatttgttttaaataatagtgtttaggaagaaatatattgtatgtataaaagtagggattgtttattttttaggattttttataaattgtgggttatagattttaaaaggtagggattgaggaaggataatgttaaattttgttataatataaatttttataagagatattttagaattttagtttatttagtggtttatttattttatatagttttaattttatagaagaatatagttatttttttggagtaaaagtaaaaatttttgatttgtttttttattagtttagtatttagaatgttatatattaataaattagtgaattttgttgtagagatagggagaaaggaagaggaattgttttagagttagaatgataattttaagaaaaattttgttagaagatgttgttaattattaaagagatgtatttgtggttgggtatggtggtttttgtttgtagttttagttattggggaagttgaggtaggaggattgtttgagtttaggagtttgaggttgtagtgagttatgattgtagtatggtattttagtttgggtagtagagtgaggattttgttttaaaaaaaaaaaaaaaaaaaaaagatatgtttatgtaaaaaatattttgtaattttttggaaattggaaaggatatataatagttgtttagagtttattttttaattggaataagaatagttttgttaaattgatttaataggtttggtattatgttatttgtatatttattggtgatttgtagggttaattatgtaaggtaaagatgagttagttttttattaaggaggtagtatatttgttaaaatgttttttttgagaaggtttgaagatatatgaaaagtaaattaaattataggtgggtgttagtgtatattaatgtatttagattagtatgtttttgatagtggattatagtttttgtaatatatgtttaagtaattttttatttttaagagttgaagatttaaagtatttttttaaagttaatgtaatgttggagaaatagagggtagtgaatggatagattttggaataatggtaaatgagttaagttttggtttgaattattgtgagtgagggtgaaaaatgtttttttgttagtattattttatggtttaaatatttgtttttaatagtaattgtattagatgttaatagattatgatatttgattttatatgtatgagattttgaaggtaagtgaattttgaatattaaatattttttaaattggttttttttttgttaaatagttaattgatggtagaaaagttagtagattaattttgtaaagtatgttgaaagaagggatttttatataagtttttaataagttaatagtattatatttgtaattttagtattttggaaggttgaggtaggaggattgtttgaggttaggagattaaaagattagtttgggtgatatagtgagatttttatttttataaaaaaaaattgtttaattatttgggtatggtggtgtgtatttgtaagttttagttatttgggaggttaaggtaggaggattgtttgaggttaggagattaagattagtttgagtaatatagtgagattttgtttttataaaaaatttaaaaattagttgggtatggtggtttatgtttgtaattttagttatttgggaggttgtgataggaggattttaggaatttgaggtagtagtgagttatgattgttgtataggttggagtgtagtagtatagagtaagattttgtttttaaatatataaataaataaaaattaataataatagtattagaatttttgtgttaagggttatggaatggggtttagtgggagtataatttagaataatttgaaaaagggtatttgtaagatagttgggattgattttttaataaatatttgtaatttttgtggtttttatgtaagttaatattaaatttttaaaatttgtgaaaatatttgatgtgttagtttttggtatattttattttatttaagagttagtaaataaaatagtaaattttaatttagtttttaaagggtaattgttttaaggattgtgtaaatttttgtttatagatgttaattgaaaatttatttatatttttaaagtggggttattaaatattttgtttttagtagttataagattagttttttagaagagagaattgttaaaagttggttaagtttttttattaaataagagttgatataaagtttgttgttggagttttagaaattttttgaggagattgtgttagtagagatatttgatttttttattggtttatgtagtttgtggtaagtaaggttttagaaagttatagatatgattgtttagttttgggaattgtaggaatttaagttgttttttaggaaggataagaatttggttaataatgttggttgattgaaaggttgggattaataaattttaaagattatattatttagttttttttagtttgaggttggaaatattttagattggatttgatga

SEQ ID NO: 720 - DNA, 6199 bp, Artificial Sequence
  chemically treated genomic DNA (Homo sapiens)
aataataaaaattagttgttagttgggtatggtagtgggtgtttgtagttttagttatttaggaggttgaggtaggggaattgtttgaatttgggaggaggaggttgtagtgagttgagattatattattgtattttagtttgggtgatagagtgtgattttgttttaaaaaaatttaaaaaaataaaaaaaattttaaaaattagttaggtgtggtggtttatatttgtaattttagttatttgggaggttaaggtaggagaattgtttgaatttgggaggtagaggttgtagtgagtttagattatatttttgtatttttggttgggtggtagagtgagattttgttttaaaataaaaataaaaaattaaatagttttagaggagtagtgggatggagaagtgttatgagtagaaggttttgttgtagagagatagaagttgagaagggtagggtggtgatggtggagttttaggaattaggagtagggatttgtgggatttaagggaaggtatgggattggggtggggtggattaggttaaatgttgttggtagggtaggtttataagtgtaggtttttgaggtatttttaaggtattgtggttgttttgtatgattttttagggattttttttgtagttgtgttagggttttgtggggttggggtttaaaaagtgtgtggagttttagttggtggagatttagaatgtgtggtttattgaggtggagtgtagtgtgagtgtgggtttatagtgggttttggggaggtgttttgtgtagtgtgagtgtgggtttatggtggattttgggttggggggtattttgtgtagtgtgagtgtggatttatagtgggtttgggggtgggggtgttttatgtagtgtgagtgtgggtttgtggtaggtattagggggtgtttttgttatttggttattgttaatttttatttttgggtagaatgtgatgttggtggtagagaaggtagttttgtaggggtagttgtagtatttggaggggtagttggggagtttgtagggttgtgtttaggagttgttgttgtagagttagtgggtgtaggagtatagtagttgtttgtaggtgggtggtggtttgggtgtttatttttgtttatgtattgtttttttttgttttttttggattattttgtggtttttttttattttagtttttagttagttgttttattttttttttagttttatttatttttgttttttgattttagttattattttgtattattttttttgttattatttttttttatttgttgttagtttttatatttatatttatgttgttttgtgtttttattgttttagtttttttttttatagggtgttattagttttattttgttttgtgttttttttggatagtttggtttagttagtttttgttgttttttttttgtttattattagtttttggttggggtttgtattgtttgttgtgtttttagttttttgttttttttataatttttttattgttttgggttttattgtttgtttttagttttttgttttttatttgatttttagttaggggtttttttttagtagtttttgttttttttttttattttaggttgagaagtttgtgttggagatttagggttaggagttgtattggaagttggaggtgttggaggaggaggtgtgggtggtatggtagttttaggaggagatttgtgggtagtagtaggttttgttttgggattataaggttttggtatagttgtagtggtggtaggaggttgagttagagggattgttggtgtggtattgagattttaaggttaatatgtgggtattggagttggtttattgggagttgtagggttggtgagtattattaaatgtttagttttttttttggtattttttatttgttagagaagattttttttagtaggtttgattttttattaggaagtatttttatttttgttttgtgatgttttggttattgttgtgttttttggggtagttgtgttttttatatttttgggttgggttttttgtggggtttatttattgggagtggtgggtatttggtatggtattttgtttaatggttttttttgggggatttaggtttaggaggtgatagatttttttgttttgggtttagatagtttagttagttgtttgtggtggttataggtttatatagtttttttagttttttgtttattttaggtatgagtagttgtaggtttagtgggttagtgtggaggtataggaggtggttttgttggtagagtgtgaatgtttgatgtaagatgggtattggtagtggggtttggaggaggagttgtggaggttttagagtgagtatgataggtgttgtttttgttatagtttttagtagtttttagtggttttattttgaaagtgggttgggggtgtggggttttgtttggttttttttttttggtataatttttttggttagtatttggattggggatttaggttttttggagagtagttttttttgttttttaagggtttagatgttgttggtagagttgttttgggagtggggtgagttgtagggtgaatgtggggagttatggggttggttggtgtggttggagttggagtgggtatagttggagatgtagagttagtagttgtgtgagtttaattagtagttggatttgagtgtttgttggttgattatgtagtgtgaggtgtggttggagggttggtgggggtatgggtgtgtggtggggtagaaagtttagatttaggtggttttgagttgggttttattttttgagttatggtgtttttttgttagttattgatatagttgtgaagtgtttaggaagaggagaattggtagttgttggttgaagtttaggttttgagttgggagaatagggagtttttggagtgtagtttggagagttgggattatttgtattgtgaatagtgggagtatttgtgagtgggttgtttgggagtggggtggggtttgtattttttttgggtgtttttggggagagtttttagtgagggtttagggatagggttggagttgattttttaggttagtttaatttgtggtatgggattagtgtgtttttgttgtagtttgtgttttgttattgttttggtttttttgggttttatatttatttttttttttttatttttgttagggattagtttaatgttttgtgttgtgagaagtagaagtttgtggagaagattatggattaatattgtgtgttggagtttgtgtttttgttttggattaagtgagtagttttgttattttttttaggttggatattttgttaatttttgtttttgttttggtttttgattttaggtttagtttaggtttaggttttatgaaggttaatttggtttttgatatttttaggatattttttgtttttttttttttttttgttttgatttttttttgtgtttttttgtttttaggaagggtagttggttggtagataaggtgaagaggttgatgtggttttggtgggaggggggtttttttggggggttgtgtttgggggttgatggggttggtagtattgagagtttggggggttttttggagatggagttttttgagggtagggaggtagatgggataggtgggtttgggggttaggtggttaggatggtttttgttttatattttttgttttttattttggtatttgttttattgtttggtttgtatgtgtgattttattggttttttttgaggtttgttttttttgttttgatgttattaggggtttttttttttgggttttatagggttatttttggtttatattttttttttgtttgtgttgtttttgatttagtttgttttatttgtagtggagtttaggatttgggaggtgtagtggattttagggagaggttattgtttttagattgtagatgaggagattgaggttttgggaggggaagtttttgtttaaggttatgtagtgagttagtatgaaggttagtatagggttagtgttttgttgttttatttatttgtttggttttttttttatttttgtattttttttttttggttttgggtagttttatttattggtttttttattttatttagggttttgtttttttgattttttttttgtatgagtttttgttttttttttttgattttttttttgtatgaattttagtttttttttttgattttttttttgtatgagatttagtttttgttttttttttttgattttttttttgtataagttttagttttttttttttttttgattttttttttgtatgagttttagttttttttttttttttgattttttttttgtatgagttttagtttttattttttttttttgattttttttttgtaggagttttagtttttttgttttttttgtttgattttttttttgtatgagttttagttttttttttttttttttggttttttttgtgtatgagttttagtttttattttttttttttgattttttttttgtaggagttttagtattttttttttttgtttgattttttttttgtgtgagttttagtttttttttattttttgattttttttttataggagttttagtttttgttttttttttttattttttttttgtatgtattttttgtagggtttttttttttggtatttatgtgttgggtttagagttttttttgtttgtgggatgagattttggtaggtgggtagtggtggaaatttagtttaaggtttttggtggggtgaagttttgagttatttagttttggggatatttttaggtaatgattttgatagtgttatttaggttttttgggggtgtttgttttttatagtaaaggtgagggataagggttattgtattagttagttttttaattttttgtggatttattagttttttgggggaggaggttttttttttgttttttgtgttttttgtaagttttgtttatttttgtattggttttgggtttagtggttgttttgtgttttttaggatttggtgtgggatgggagaattttgttgagattttgtaggaatatgaaatagatgttaattgagagggtgagtgggggattgtggaaggagtagtattttttgttttgtttggggtttttggtagaattttatttatttatttttttatttgataatgattttttattaagtgttaggtgatgtgttggtaggggatatagtagggaatgttttggtgtgaggaggtagatagtaaataatttgtttaaaaataattattatttataatagttttgtttattagaaatatggtgtgaattatatgataattttaatttttttagtaggtttattagaaaaagtgaaaagagataggtataatggattttaataatatttaatttaatatgtttatgttattattattttagtatgtagttagtgtaaaaattatgaatgagttattagatgtgatgttttttttttttttttgagatggaattttattttttggtttattgtaattttttttttttaggtttaaatgatttttttggtttagttttttaagtagttgggattataggtatgggttattatgttaggttaattttgtataattattattattttttttagtagagatggggttttattatgttggttaggttggttttgaatttttgattttaggtgatttgtttgttttagttttttaaagtgttgggattataggtgtgagttatttagttagatgtgattttttttatagtaagtttttggtagttttggaggttaaggtaggtagattatttgaggttagaagttagagattagtttagttaaaatggtgaaattttgtttttattaaaattataaaaattagttaggtatggtgttttatgtttgtaattttatttatttagggggttgaggtaggagaattgtttgaatttgggaggtagagggtgtagtgagttaagattatgttattgtattttagtgttggtgatagagtgagattgttttaaaaataaaaaataaaaaataaaaaaatatagtaggtttttgaagtatgttataggttaattttattttatttatttagttttgttttgggtagtttagttttagatttggttggattattaggaggtgttaatgttttgggaagaa

SEQ ID NO: 721 - DNA, 6199 bp, Artificial Sequence
  chemically treated genomic DNA (Homo sapiens)
ttttttttagagtattagtgttttttgatggtttagttgggtttagggttgagttgtttagggtggagttaagtaggtgagatggggttggtttgtgatgtgttttaaagatttattatgtttttttgttttttgttttttgtttttgagatagttttattttgttattaatgttggagtgtaatggtgtgattttggtttattgtattttttgttttttaggtttaagtgatttttttgttttagttttttgagtaggtgggattataggtatgggatattatgtttggttaatttttgtagttttagtagagatgggattttattattttggttaggttggtttttaatttttggttttaagtgatttgtttgttttggtttttgaaattgttaaagatttattatgaaaaaaattatgtttggttgggtggtttatatttataattttagtattttgggaggttgaagtgggtggattatttgaggttaggagtttgagattagtttgattaatatggtgaaattttgtttttattaaaaaaaataataataattatataaaattagtttggtgtggtggtttatgtttgtaattttagttatttgggaggttgagttaggagaattgtttgaatttgggaggaggaggttgtagtgagttaaagagtgaaattttattttaaaaaaaaaaaaaaaatattatgtttaatagtttatttatgatttttatattggttatatgttgaaatggtaatagtgtaggtatattgagttaaatgttattaaaatttattgtatttgtttttttttattttttttggtaagtttattggaaaagttaaaattattatgtggtttatattatatttttagtggatagggttgttgtagataataattatttttaggtaaattgtttattatttgtttttttatattagaatgttttttgttgtgttttttgttagtatgttatttggtatttggtaaaggattattgttgaatgaaagaatggatgaatgaggttttgttaggggttttaggtaggataaagaatattattttttttatagttttttatttatttttttggttggtatttgttttgtgtttttgtagggttttagtggagtttttttattttatattaggttttgggaggtataaggtaattattgggtttagggttagtgtggaagtggatagagtttgtaggagatataggggataagaaggaagtttttttttttaaggagttggtgggtttataaagagttggggggttggttggtatagtgatttttgttttttatttttgttgtgggagatgggtgtttttagggggtttggatggtgttgttggaattgttgtttaggggtgtttttagggttgaatgatttagagttttgttttattgggaattttgagttgagtttttgttgttgtttgtttgttaaggttttattttgtaggtagagggagttttgggtttggtgtatgggtgttggggaaggggattttgtaagaggtatatgtagggagggggtgagaggaggggatgggagttgaggtttttgtagggaggaggttagagaatggggggaggttgaggtttatgtagggagggggttagataaggggagggggtgttgaggtttttgtaggaaggaggttagagaagggaagtgggggttgaggtttatgtatggagagggttagaggaggggagagggagttgaggtttatgtagggagggggttagatgaggggagtgggggggttgaggtttttgtagggaggaggttagagaagggaagtgggggttgaggtttatgtagggagggggttagaggaggggaggaggttgaggtttatgtagggagagggttagaggagggggggaggttgaggtttatgtagggagggggttagaggaagggaatggggattgagttttatgtagggagggggttagaagagggggttgaggtttatgtaggggaggggttagagggggggggtggaggtttatgtagggagggggttagaggaatagggttttggatggagtagaggggttagtgggtgaagttgtttagggttagggaggggaggtgtagaggtgggggagaagttaggtaaatgagtggggtagtaggatattggttttgtgttggtttttatattaatttattgtatgattttgggtaaaagtttttttttttggggttttagtttttttatttgtagtttaggaataatgatttttttttagagtttattgtattttttagattttgggttttgttgtggatggggtaggttgggttggggatagtataggtaggagggaggtgtgggttaagggtgattttgtaggatttagggaaaagagtttttggtggtattagggtagggggggtaggttttagggaaggttaatggggttatgtatgtaggttaggtagtgaggtaggtgttaaggtgggggatagaggatgtggggtagggattattttggttatttgatttttagatttatttgttttatttgtttttttgtttttaggaagttttgtttttggggggttttttaggtttttggtgttgttagttttattggtttttaggtgtagttttttaggggggttttttttttgttggggttgtattagtttttttattttgtttgttagttagttgttttttttgggggtaagagggtataagagggggttaggatagggaggagggagggagtaaagggtgttttggggatgttaaaggttaggttgatttttatggggtttggatttgagttgggtttggggttagaggttagggtaggggtagaggttagtaggatgtttagtttgagggaggtgatagggttgtttatttggtttggggtaggggtataggttttagtatgtggtattggtttatgattttttttatgagtttttgttttttgtggtgtagggtattaagttggtttttggtaggagtgagaagggagaggtgggtgtgaggtttagggaggttgaggtagtagtaaggtataagttgtagtgaggatgtattggttttgtgttgtagattggattgatttggaaggttagttttaattttgtttttaggtttttattaagggttttttttaggaatgtttaaaggggatgtaggttttattttgtttttaggtggtttatttataggtatttttgttgtttgtggtgtaggtggttttgattttttaggttgtgttttaggagttttttgtttttttggtttagggtttgaattttagttagtagttgttggtttttttttttttgggtattttgtagttgtgttaatagttggtaggggggtattatggtttggagggtgggatttagtttaggattatttgggtttaggttttttgttttattatatgtttatatttttattggttttttagttatattttatattgtgtggttagttggtaggtgtttaggtttagttgttggttggatttgtgtagttgttggttttgtatttttagttgtgtttgttttagttttagttgtgttagttggttttgtagttttttgtgtttattttgtagtttattttgtttttgagataattttgttagtagtatttgagtttttgggaggtaaggagagttgttttttaagggatttgggtttttagtttgagtgttggttagagaagttatgttggggaggggaggttagataggattttatatttttaatttatttttaggatggggttattgagagttgttagaggttgtggtaggggtggtatttgttgtgtttgttttgaagtttttgtagttttttttttaggttttgttgttgatgtttattttgtattaggtgtttatgttttgttagtagggttattttttgtgtttttatgttggtttgttgggtttgtagttgtttgtgtttgggatggataaggggttaagagggttgtgtgaatttatggttattataagtagttggttggattatttggatttggggtgggggggtttgttattttttaagtttaggttttttagaggaagttattgggtagaatgttatgttaggtgtttattatttttaataggtgagttttatggggagtttaatttagaagtgtggggagtatagttattttagagggtatagtagtggttggggtattatagagtggaggtggaggtgttttttgatggggagttagatttgttgaggggagttttttttggtagatagggggtgttaggggaggagttgggtatttggtgatgtttattggttttgtagtttttggtgggttagttttagtgtttgtatgttggttttgaggttttggtgttgtattagtagtttttttagtttggttttttgttgttgttgtagttgtgttagggttttgtggttttgaagtagggtttgttgttgtttgtgggtttttttttgggattgttgtgttgtttgtatttttttttttagtatttttagtttttggtgtagtttttggttttgaatttttagtatagattttttggtttaggatggaggagggaagtaggggttgttggggaggaatttttggttggaaattgagtgagaggtggggggttaagggtagatggtagggtttaagataatgagagagttgtggaggaggtaaagggttgggggtatagtaggtagtataagttttagttagaggttgatggtgagtaggggagaggtggtagaggttggttgggttaggttgtttggaaggggtatagggtagaatgggattaatggtgttttgtggaggggagggttgggatagtgagagtgtagggtgatatgggtgtagatgtgggggttggtggtaggtaggaggagatagtggtagggaggatggtgtaaaatggtggttggggttagaggataaggataaatgagattggggaagaggtggggtagttggttgggagttgggatagaaaaaggttataggatgatttaaaaggagtaggagggggtagtatatgggtagggatgggtatttgggttattatttatttgtaggtggttgttgtgtttttgtgtttgttggttttgtagtagtagtttttgggtatggttttgtaggttttttagttgtttttttaggtgttgtagttgtttttgtaaagttgttttttttgttattagtattgtattttgtttagaagtgggggttagtaatagttaggtggtgggggtattttttagtgtttattataggtttatatttatattgtatggggtatttttatttttgggtttattgtgagtttatatttatattgtatgggatattttttagtttagggtttattgtggatttatatttatattgtatggggtatttttttagggtttattgtgggtttatatttatattgtgttttattttaataagttgtatattttgggtttttattagttgaggttttgtatgttttttgggttttagttttgtggggttttggtgtagttgtaaggagagtttttgggaggttatgtgggatagttgtagtgttttggggatgttttaaggatttgtgtttatggatttgttttgttagtagtatttagtttagtttattttgttttaattttatgtttttttttggattttataagtttttgtttttggtttttgaagttttattgttattattttgttttttttaatttttgtttttttgtggtagagttttttgtttataatatttttttattttattatttttttaagattatttggttttttgtttttgttttgagatagagttttattttgttatttagttaggagtgtagaggtgtgatttgggtttattgtaatttttgttttttgggtttaagtaatttttttgttttagttttttgagtagttgggattatagatgtgggttattatgtttggttaatttttagggttttttttgtttttttgggtttttttgagatggagttatattttgttatttgggttggagtgtagtggtgtgattttggtttattgtaattttttttttttaggtttaagtaatttttttgttttggttttttgagtagttgggattataggtgtttattattatgtttagttaatagttaatttttgttgtt

SEQ ID NO: 722 - DNA, 6229 bp, Artificial Sequence
  chemically treated genomic DNA (Homo sapiens)
tatatttttttaaagttttattgttttagatattttgagtgggtttaaaggaaggatttaggttagaatttagtaatttattttgtatttttaaaaattattttattttatttatttatttttttgagatagggttttattttgttgtttaggttggaatgtagtggtatgattatggttttttgtagttttgattttttaggttttagtaatttttttattttagttttttgagtagttaggattgtaagtatatattattatatttatattatttttttgattttttttttttttttttattagagataaggttttgttatatattttttaggttgagtttgaatttttgagtttaagtaatttttttattttggttttttaaagttttgggattataagtattagttaaagtatttggttatttatttttttttttttttttttttttttgagatggagttttgttttgttgtttaggttagaatgtggtggtgtgattttggtttattgtaattttagttttttaggtttaagtgatttttttgttttaattttttaagtagttgggattatagttgtttgttattgtgtttggttattttttttgtatttttagtagagatgagtttttgttatgttggtaaggttggttttgaatttttaatgttaagagatttatttgttttggttttttaaagtgttgggattataggtttagttatttatttttaatatgtatgtgtttattagtatttttaaattatagtttaggtatggtggtttatgtttgtaattttagtattttgggaggttgaggtgggtgaattatttgaggttaggagtttaagattagtttggttaatatggtgaaattttttttattaaaaatataaaaattagttaggtgtgttgttaggtgtttatttatttgggaggttgaggtaggagaattattttaatttgggaggtagaggttgtagtgagttgagattatgttattatattttagtttgggtgatagagtgagtgagatattgttaaagaaaaaaaaaagtataaagataaatttagatatataatttataatattggtattttagtggagagggaggatattattggtattattttattaaattaaaagggttgatgaaaaaaatttaataaaagttatattattttattattttaaaatatatagttagtttttttaaaatatgttattttaagttatttaatatagtttttgaaatggaaaaaaaatttaaaaattaaatggtttttttttaaatatataattttttattaagtaatgttaataaaattttttagatttttagtttttagtttattttttttttttttaatttaaatgtttgattgtgtttatttttaatattaataagataagttattttaaatggatatatgtatttttaggagaaatgtattttatttttatagttttttttttttattttttttattttttgttgaaatttatttaagtgaatagtatttgggatatgggaattattattaagtgttaagttattttaattattgtttgataataattatgttttaaggtaaaaatgattatttttttaaatagataaaattaataggataaagattattaaagattaatatttattatattaatatagagattttttttagtttttgaagatataattaagggaatttttttatattataggagagtattttttgtttttaaatatttttgttaataatgtataaataaaaatatttaatatgtaattgtatagtttaatgaatttttggaaagtaaatatttattgtaaagtaaattattatttaggttaagataaagaatattgttagtattttaggagattttttgtttgttttttttagatagtaatttttttttaaattttttattattatttgattttttttgtaagaggtgggggttgttttgttttttaattattttaggtaatagtatgggagtaaagtaaatatttaaataattgtggtttattggatatatttttgtatttattatttaagtatatattttagataaaagttttattgtttagatgattgtttttgttttttattttaatgagtggtaatgggtttaatagattaattgaggtgggtgtttttgaatgttaataaattttttttttagaaatggtatttaattaattttggtttttgtttataagtattattatgataattaggaatgattgtttgtgtagtagagtatttatatgtaattgtaatgagagtgagttatgagttaaattgtataagtgtgtggtggtgttggtgagtaattaattaatagtttttatatttaggaattgaattagtgttagaaagttatttggatagtaaatagtaatatgagaagaattttaaatagtttatagttgtagaaaatgtattattttaggttttgaatttttttagttatttttgtttgttgttattttgaaaataagttataatatgtaaaaattaaaagagtatttaataaaggttggtatttattttaagtaattttaggattatttttttgtatgatggtttaagtttggtttggtaagtatttattatttgtttgtttgttttaaattttttttttggagattaattttttttttaagttatttatttatgaatgataaaatgtttttgtgtgtagtttttattttttttttattatggattgtaaattgagagggaaaagattaagaaaaattgaagaagtatttgtttttgatgttaagtttttttttattggttattttttttagaggatatagagagtttagagaggtaggttgataatgttattttagtgttaggttttgattaaaaagaggaagagaagaaaattgtagagggataaagtgggaaaataattgaattttaaggaaatgaatatttaataagtatttattttgtttaagatattatattatatatttgattgggagatgaggtaattataaaataaaatgaagtaatttgtaatttagtttgtattagagtagttaggtttagtgagagattagtggaggtatgtttgttttttgaatgattgtagtgttttttattttgattttttagagttttaattagaagggatgaggatggaatattggaaaagggaaatatagagtatttgtttgaattttttaaggtgtgggattgtagtgtttggggattaggttatgttatttaaaaagttgaggtagtattataatgttgttgttatgaaatttttttattgttttattgttttagtttatgatttgtgtataatgggatgagtattgggagttatatggtttggaatataataattaattatatgttattatgtttaagattttaaaagatttgaaatttttatttgttatgtattaataggatagtttttggatattgttttgtatttaagttataatattattttataagttaataaattatattttgttttaaaatttttaaatatagtatttttttaaattaaaaagtatatattggttagttgtggtggtttatatttgtaattttagtattttgggaggttgaggtgggtggattatttgaggttaggagttgaagattagtttggttaatatggtgaaatttagtttttattaaaaatataaaaattagttgggtgtggtggtgtgtgtttgtaattttagtgatttaggaggttgaggtaggaggattatttgaattttggaggtaaaggttgtattgagtggagattgtattattgtattttagtttgggtgataagagtaaaattttattttaataaaaaaaaagaaagaaagaaaaatgatattagtatttattttatattattagtataatagttaataatttaaaatgttttttgattgaatgtagttattaaaattaatttatattttttttttttggaaattatgggaatatttttaagggattaaaaatgttttggataaaatattagtaaggaaagaaagttttaagaatttaaggttgggagtggtggtttatgtttgtaatttgagtattgtgagagggtgaggtagaggattttttgaggttagaagtttgaaattagtttgggtaatttgataaaattttgtttttataaaaaaatataaaaaatataaaaattagttgggtgtggtagtatatatttgtagttttagttatttaggaagttgagggatgattgtttgagtttgggaggtagatattgttgtgagttgtgattgtggtattgtattttagtttgggtgatagagtgagattttgttttaaaaaataaataaataaataaataaataaataaaattttagtatgggtaatatggtaaaattttgtttttattaaaaatatattaggtatgatggtatgtatttgtggttttagttatttgggaggttgaggtaggaggattatttgagtttgggaagtggatattgtagtgagttgagattatgttattgtattttattgttggtgatagagtgagattttattttaaaaaaaaaaaaaaaaaaaaagaatttaaataatttaataaagtattgaaaagtagtttaaaaaaattgtgattatatgattaatagtattgttgttataatttgggatgattttaaaatatggttataaaattattttatattatttttgtatttattggtgttgtttgttaaggttgtgggtaaagttatttttaagttgagtaggaaggttattggtatagttttttatgtttttattattaatgtgttttttatggatttgatttgttatttggagagatttgttaaatgtgatgagaggttaggtgtatgatttttttttttgaatatggttttagtgatggtttgatttttaatagaatatagtaggggtaatgttttattaatttttaggtttaagaagttgtagtttttatttttttatttaagatatttgtttgtgagatgtttatttttagaaggtagttattaagtagtgaatagtttaggatagatatatgggagaggttaaggataagtgttgataaattttagttgattgttagtattaatagttaaatttttgagtgaagaagtttttaatgattttattttttagatgttatgtttttttatttgatgtttagataatatgggttaaagataatttgattttggtgtgttttatttaatttttgattgtagaattagagtataataaaatgaatgttttatattattaagttttgggatggtttgttatagtaatatattattgtagtatgatttattagaatgaaattatgtaattattatagttaataatttattttttttttaaaaaaaaaatttatattttttgttttttttatttaatagttatatttttttatgtaatatttattatatttttgagatattataatgaaagtgaaagttaggtaaattgatttggttttattagatatttggttattaaggttgtttttaattttggtgaagtggatattgttttattaaggatttttttattgtttttaattatatggtttatatgttttatgatgattttatttatggtaaattttgtggtatagttaaggttgagaatggtaagtttgttattaatgaaaatattataattattttttaggagtaaatttttattaaaattaaattgggtgatgttattataattatattgtggagattattggtatttttattattttgtagaaggttggggtttatttaaaaggagaaattgaaagggttattatttttgttttttttgttgatgtttttatgtttgtaatgggtatgaattatgaaaagtaaaaaaatattttgtaatttttagtaaattttttatattattaattgtttagtattattggttaagattatttatgataattttggtattatgggaggaattatgattttatttatgttattattattgatatttagaagattattgatggtttatttgggaaattgtggtgtaatggttttttagaatattatttttgtatttattggtgttgttaaagttgtgggtaaagttatttttaagttgagtagggagtttattggtatagttttttatgtttttatagttaatgtgtttattatggatttgatttgttatttggagagatttgttaaatat

SEQ ID NO: 723 - DNA, 6229 bp, Artificial Sequence
  chemically treated genomic DNA (Homo sapiens)
gtatttggtaggtttttttagatggtaggttaggtttatgatggatatattggttgtggggatatagaaggttatgttagtgagttttttgtttagtttggagatgattttgtttatagttttggtagtattagtaggtataggagtgatgttttggaaagttattgtattatagttttttagatgggttattagtggttttttggatgttagtgatagtagtatggatgaggttatgattttttttatgatgttaaagttgttatgggtgattttggttagtggtgttaagtagttagtggtatagaaggtttgttgggaattgtgaggtgtttttttattttttatggtttatgtttattataaatatgggggtattagtagagggggtagagatgatgatttttttggtttttttttttaaatgagttttagttttttataaggtagtgaagatgttagtggtttttataatgtaattgtggtggtattatttaatttgattttggtgggaatttgtttttagaaaatggttatggtatttttattgatgataagtttgttatttttagttttgattgtgttatggaatttgttatgggtagaattattatggaatatatagattgtgtagttgagggtaatgagggggtttttgatgagataatatttattttgttagagttaaaagtagttttggtgattaggtgtttaataaggttaaattagtttatttggtttttatttttattgtgatgttttagggatgtgatgggtgttatatgagaagatgtggttgttgaatgggaggaatagaaagtgtaaattttttttttaagaaaaaaatgaattattgattgtagtaattgtgtgattttattttaataggttatgttgtaatgatatattgttgtaataaattattttaaaatttagtggtgtaaaatatttattttattatgttttggttttgtagttaggaattggatggggtatattagagttaggttgtttttggtttatgttgtttgggtattaggtggaaaaatatgatgtttgagggatggagttattgaaggtttttttatttagaagtttggttattggtattagtagttagttggagtttgttaatatttatttttggttttttttatgtgtttgttttgagttgtttattgtttggtggttattttttaagagtgagtattttataagtaggtgttttaagtgaggaaatggaagttgtagttttttaaatttgggaattagtagagtattatttttgttgtattttattagaggttaagttattattgaagttatatttaaggagagggattgtgtatttgattttttattatatttggtaggtttttttagatggtaggttaggtttatgagggatatattggtggtgggggtatagaaggttatgttagtgatttttttgtttagtttggagatgattttgtttatagttttggtaggtagtattagtaggtgtaggagtgatgtaaaataattttgtggttatgttttaaaattattttaggttgtgatagtagtgttgttgattgtgtaattataatttttttaagttattttttaatattttgttagattatttagattttttttttttttttttttttttgaggtagagttttattttgttattaataatggagtgtagtagtatgattttagtttattgtaatgtttgttttttaggtttaagtgatttttttattttagttttttaagtagttgggattataagtgtatgttattatgtttggtgtgtttttggtaaagatagggttttattatgttgtttatgttggggttttgtttgtttgtttgtttgtttgtttgttttttgagatagggttttattttgttgtttaggttggaatgtagtattataattatagtttatggtaatgtttgttttttaggtttaggtgattgttttttagttttttgagtagttgggattataggtgtgtgttattatgtttagttaatttttgtattttttgtatttttttgtagaggtagggttttgttaagttgtttaggttggttttgaatttttggttttaagggattttttgttttgtttttttatagtatttgaattataggtataagttattatttttggttttagatttttaaagttttttttttttgttaatgttttatttaaaatatttttaattttttgagagtatttttatagtttttagaagaaaaaggtatgggttggttttagtagttatgtttagttaggaaatattttaaattattaattgttatattaatggtatgaaatggatattaatgttatttttttttttttttttttttttgttgagatggagttttgtttttattgtttaggttggagtgtaatggtgtaatttttatttagtgtaatttttgtttttggggtttaggtgatttttttgttttagttttttgagttgttgggattataggtatatgttattatgtttggttaatttttgtatttttagtagagattgggttttattatgttggttaggttggtttttaatttttgattttaggtgatttatttattttagttttttaaagtgttgggattataggtgtgagttattgtggttggttaatgtatgttttttaatttaaaagaatgttatatttgagggttttgaaatgaaatataatttattagtttatagggtgatgttataatttaaatataggatagtatttaaaagttgttttgttaatgtataatagataaagattttagattttttgggattttagatatagtaatatgtgattaattattatattttaaattatgtaatttttagtatttattttattatgtataggttataggttggggtagtgaggtagtgagggggttttatgatagtaatattgtggtgttgttttaattttttagatgatatagtttgatttttagatattgtagttttatattttaagaagtttaggtgggtattttgtattttttttttttagtattttatttttattttttttggttgaggttttgggaggttgaggtaaaaaatattgtaattatttagagaatagatatgtttttgttagttttttattagatttaattgttttggtataggttggattgtaaattgttttgttttgttttgtaattattttattttttaattaagtgtgtgatatggtattttaaatagaataagtatttattaaatatttatttttttgaaatttagttgtttttttattttgtttttttgtagtttttttttttttttttttttgattaaggtttagtattgagatgatattattagtttgtttttttggattttttgtgttttttagagagaataattagtgaaagaagatttggtattaaggatagatatttttttagttttttttagtttttttttttttaatttatagtttatagtgagggagaaatgaaagttatatatagaagtattttgttatttatgggtggatagtttaggaagaaaattggtttttaaggaaaaggtttaaaatagataaataaatgataagtatttgttagattaaatttaaattattatgtaaaggagtaattttgaaattatttgggataaatgttagtttttattggatgtttttttaatttttatatattatgatttatttttaaaatgatagtagatagaaataattaaaagaatttaaagtttggaatagtgtattttttatagttgtaagttatttaaaattttttttatgttattgtttgttatttagatggttttttggtattggtttagtttttagatgtgagagttgttggttagttatttattagtattattatatatttgtataatttggtttatgatttatttttattgtaattatatgtgggtattttgttatataaatagttatttttgattgttatgatggtatttgtaaataagaattagaattgattggatattatttttagaaggaagatttgttgatatttaaaagtatttattttagttagtttattggatttattgttatttattggagtgagaaatagaagtagttatttagataatgaaatttttgtttaaaatatatatttgaatgataggtgtaaaagtgtatttagtgagttataattatttggatatttgttttgtttttatattgttatttaaagtgattaaaaaataaaataatttttattttttataaaagaagttagatggtggtaggaggtttgggagagggttgttatttgaaagagataaataaggagttttttgagatgttggtagtgttttttgttttaatttggatagtggtttgttttgtaataggtatttgttttttaaaaatttattgaattgtataattatatgttgggtatttttgtttatgtgttattagtaaaagtgtttaaaaatagaaaatgtttttttgtaatgtaggagaatttttttagttatatttttaaaggttagagaaggtttttatgttaatgtagtagatattggtttttggtagtttttgttttattaattttatttatttagggaaataattatttttattttaaaatgtggttattgttaaatagtgattggaatagtttaatatttaatgatagtttttatgttttaaatattgtttatttgaatgggttttagtaaggggtggagagggtgaggagagaagattgtggggatgaaatatattttttttggaaatatatatatttatttggaataatttattttgttgatgttaggggtaaatatggttgaatatttagattagaaaagaggaaggtagattaaaaattagaaatttgaagagttttattagtattgtttaataaaaaattatgtgtttggaagaagattatttaatttttaaattttttttttattttaaggattgtattaagtaatttaaaatggtatattttaaagaggttagttgtatattttggaataatagagtgatatgatttttattaaattttttttattagtttttttagtttgatgaaataatattaataatgttttttttttttattgaaatattagtgttatggattatatgtttaaatttatttttatatttttttttttttttgatagtattttatttattttattgtttaggttggagtgtagtggtgtgattttaatttattgtaatttttgttttttaggttaaagtgatttttttgttttagttttttaagtaggtgggtgtttgataatatgtttaattaatttttgtatttttagtagagaaggttttattatgttggttaggttggttttgaatttttgattttaagtgatttgtttattttagttttttaaagtgttgggattataggtgtgagttattgtgtttgggttgtggtttagaaatattaatgaatatatatatattaagaataaatagttgggtttgtaattttagtattttgggaggttaaggtaggtggattttttgatgttaggagtttgagattagttttattaatatggtaaaaatttatttttattaaaaatataaaaaaagtagttaggtatggtggtaggtaattgtagttttagttatttgggaggttgaggtaggagaattatttgaatttgggaggttgaggttgtagtgagttaagattatattattgtattttagtttgggtaatagagtaagattttattttaaaaaaaaaaaaaaaaaaaagagaataaatagttgggtgttttggttaatgtttgtaattttaaaattttgagagattgaggtaggaggattgtttgagtttaggagtttaagtttagtttggggaatatgtagtgaaattttgtttttagtaaaaaaaaaaaaaaaaaattaaaagaatgatgtgggtgtggtggtgtgtgtttatagttttagttatttaggaggttgaggtgggagaattgttggagtttgggaggttaaggttgtagggaattatgattgtgttattgtattttagtttgggtaatagagtaagattttgttttaaaaaaataaataaataaaataaaataatttttaaaaatatagaataaattgttaagttttaatttaagttttttttttggatttatttaaagtgtttggaataatagaattttaaaagagtgta

SEQ ID NO: 724 - DNA, 6229 bp, Artificial Sequence; identical to SEQ ID NO: 722
  chemically treated genomic DNA (Homo sapiens)

SEQ ID NO: 725 - DNA, 6229 bp, Artificial Sequence; identical to SEQ ID NO: 723
  chemically treated genomic DNA (Homo sapiens)

SEQ ID NO: 726 - DNA, 6211 bp, Artificial Sequence
  chemically treated genomic DNA (Homo sapiens)
aattgattagtttttttgtgaaattagtaagtttgtttttttagtaagtttattttttatatgtgaatatattttagtatatttggatttttaaggttttttaggtggaggttgaatttttttggggtaattagtttttttggttttttattttaagttttattaagttttggtttattttgggagtttggtttttttttagagagttgtaaatttaaattagtttagagttggggttgtaggtgattttagggagatttgatttgaaaggattttttttaagtgatagggtagagtatagattgtaaaaatgtatattaagaaattatttttggttgggtgtggtggtttatgtttgtaattttagtattttgggaggttgaggtaggaggattatttgagttggggagttagagattagtttaggtaataaagtgaaattttgtgttttttttttttttattatatatatatatatatatatatatgtgtatatatataatatttatttatatatatttatttatatatgtaatatttatatatattatgtaaaattaattgattaattaattattttgtggtggtattatgggttttgatggtggtaataattgttgatgtttattttggtttggggtattgagattgtttggagattatagtgttagttttagggtggggtagaaattagaggataggggatttttagggtttggtgagttgagggtttaaggggagtgggttttaggttttttttaagttttagtttagattaggtttaggaatttagtgtgaatgtgtgtgttggggttggggataaggtgttttttttttgttggaaggagaaggaatatttgggttgggattttaaaagagttgagtgggggagaatggtggttttggtgtggtgtgtttaggggtatattattggaagggaaggagttagtagggtttttttggtggagttgagtgtgggttgggggtttgtggtaggggtggggttggtttttggggtgtggtgggggtgggggtttgtgttgggaatgttgtgttgtgggggttggggtggggtttttttggttttgtttttgtgtaggtagttaatgggtgtggtggtgttgggtgatggagggagttgaagtgttagtgttgtggtggtggtggtggatggtttagttggagtgtgaggggtttgggggggtgtggtggtttgggttgtagagttagggattttaggatttgggaggtggtgtagttggggttgttggaggagtgtgggtgatttggtggtggtgagatgttgtttgtttagtttaaggagttttggttgtttatggagttagtgtttttggatttggaggtgagtgagtggggtgggggatgggtgtttgtggttggtgagtttggatttttataggggtggggtggtttgaagtgttgttgtagtttggtgggtgtttgtgagggtgtgagtgttttttgattttttgtttattgtttggttttatttttttatgtttgggtgtgtgtgtgtgagggatagttttgttaagtgttgattatttttttgttatagttaggagaggggattttatggggtgttgagatttggttgtttttattttatatttaggatttgttttggtatttgtttagagttgttggagttttttttattaatgtagatggggagatttttagtgttagatgtttgggattttattagagataggggttatgggatttttattttttttagggttttttgttaagagttttttgtttttggttttattgttgttgagtttagaaggattgttttttttgatttttggtggatgtggagtgtgggatggtattatttgtttggggttggaatttttggttttttttgttttgaggttagggttagaggatatttgtgtgttttattttaggttgtggagatgagagtggggaagagtttttagattttgtgaagatgatttttggtagggtgtggggggattttggtgtttgtttttttttttatgttttttttggtaggaagggttgggtttttggggagtttggtttttgttagtttagattttttagataatttagtttttttttttttagaagtagtttttgattttttttgagggttttgtggttttagtttttaagtgtgtagaaggttatttttttttgtgttttttgattttagggttaaggttaagtttttgaatgagttggtggaaaattttttttttaattttttgttgggaaggaagtaggtgatatttttttttttaggtggttgttgggggtatgtagggagggaatggagattttatttgagtttaggagttgagatgatttttttttagtttgggtttggagtttttgttttagtttttttttttgtttttttttatttagggtagttattaagtgttttgttttttaggattataggtttagattagggtgagtatttagggtttttagtttttagggtgtgttgtttttttaaagggatggttgatattggttattggagggtgggtgtggtaggattaggtaattaatttgaaggagtaatttggagtaaattgttttgggatttttgttatggggattttataggtattgttaggttgtttagaggtttttttgttgatttattttttgaggtgaggaatattgttttttgtagtttttgtattgttattttgttattaggattggggtgtaaggttttgggggtggtgtttagaggtggatttttttgtttaggtatgtttttgggattaggtttttaaaggagaaggtagggttgggagaggttggggagtgattttatgttgatagggagggtggatatttaggagtttgattttggggtattattttttgtttttttttagggaattttgaggtaggggttagttttattagggagttaggtttaattgggaaatttattttagttttgagttttgtaatattttaggtttgtgagaggggaagattagtggattttttgggattggtggggtagggggatgtaatttttttaggagttttgttttagaaatgatgtgtgatttttagttagtttttagtttgtttgggtttttgtttttttagtggtaagtgttaggttttagtttttattttttgggtttgagagggtgtagagtgttgggtattgttgtttggtttttttttttttatttttggaggtgttaggtgattgggtgttattgtttgggtaataggagttatagggtagttatggtgtaggttgggttgtttttattggagaatagggttttgttgtttttagtttaggtgatatgtaagtgatatagttgtttgatttgtatgtataggtattattattgttggtagtttttagttaggaaggaggtaggtgaggggttggtgggggattttttatagggatttaggatttggattgttttgtttttttttaatgttgttgaaaatgggttgttgggaggtagggtttggtttagggtgtagtttaggtggagtaatttatgggaagtgtgggtgaggattttgtttgggttttgtttagttttgttgaaagtagtagttttgtttttaggtttagttttgttatgtatagagttttattatgtgttatttattttgttttatgaatgttattttattttaatttttataatagttttttaagatagggattattatttttgtttttagatgggataattgaaaatttaggtttatgtgttaatattagagttaggattggaattaagattttttttttttattaagtgggagagaggtttagggatggggaagggttggagttatattagtttaggtggaaggtgttttaagagaggttttggatgttggtggattttttttattttgtaaggtttttgtttagtttttgttgagggttggtagtgttagttagttttggtatttggtttttagtttttagtagtgagtagggttgttaatgttgggtttagaatttagtttttggggttgttttttgtttgtggggtatgtgttgtttttttttatttgttgtttagtttttttagatgttgttttgggtttttttttttaagatagagttgtttgggtgggaaggaatgatgttagttggaatttatttttgatattttagaattgggggtagtggtttggggttttgggtatttgtttttatgagtagtgttttttgaggaagagggaggagtgtgggtttttaatttttaagaggttaaaggatttttaagataaagttttttatttagtattttgtaaggttagtattattgtttttatttagttatttatttagtatttaggtgataagtattattttagataataaagtgtagatgttagtaagatatatttgtttttgtgatatagatgaggaaattgagattttattattattattattttttgagatatagttttgttttgttattaggttggagtgtagtggtgtgattttggtttattgtaatttttattttttgggtttaagtgatttttttgttttagttttttgagtagttgggattataggtttgtgttattatgtttagttaatttttgtatttttagtagagttaggtttttattatgttgattaggatggttttgattttttgattttgtgatttttgtgatttgtgaggttttttggttttagttttttaaagtgttgggattatagatatgagttattgtgtttggttgaaattgagattttaaaaagtgatatgaggttatgtgtggtggtttatgattgtaattttagtattttgggagtttgaggtgggtggattatttgaggttaggagtttgagattagttgggttaatatggtgaaattttgtttttattaaaaatataaaaattagttaggtgtggtggtgtggtttatatttttagttatttgggaggttgaggtagaagaattgtttgaatttagtggggtagaggttgtagtgagttgagattgtgttgttgtattttagtttgggtaaaagagtgaaattgttttaaaaaataaataaaaataaaaataaaaagtgatatgatagatttaagggtagaataagtggttggtagagttaggattagtggttgtatttttgtggttgtatagttgtgtttttttaaggattgttatgtagtagttaggttagaggggtagatgattttggatttaggatttaggttttgagtgggaagttagtattttataatttttttgatttttttattagtttgttttttagggttgtttgtttttttatttttataggtttggtgttttataagaatgatatttaagttagagatttagggagtagaggtagttagattgttttagagtggggggtttttaagttatttaggttattgtttaagaaatttatatttttaggtatatttatttttttttttttatttttagtaggtttgtagttatgtgattttgggttatggttatatgtttgttatttgtttgttgagggattttggtgagttttttaatttttttgagttttatttgaaaaataggagtaatagaatttgttttggtttttttgttgtttttgttgggttgaatttttattggataaattatatgttggattttggttgggtgttaagatgttgatgatggataagttatggtttttttttgagttaatttgtagtatgtttaggttatgggggtagagaggagggaggaaagaatatgaggttgtgtggataggggtgatatttgaatttagttttgataaaagattaggagtttgttaaagtgataaggtaggaaaggtttttttggtagagggagttattatataaatgttggggatataaaatagattgtttttagggtttgtggttgtttagtttagtttaaaaatagggtttaatgataagaatggttattgtttgtaggttagttatatgttaggtgtatatatttataggtattattttatttgttttttgttgttattattgaggtatgttattttgatttgtattttatagatgaggaaattgaagttttagtaaatgaattaattttttaggggttatgtaggtggtagaagttagaatttgaatttataaggttaggttgtaaaatttatatttttagttattgtgt

SEQ ID NO: 727 - DNA, 6211 bp, Artificial Sequence
  chemically treated genomic DNA (Homo sapiens)
gtataataattaggaatgtaggttttgtaatttgattttgtgggtttaaattttggtttttattatttgtgtgatttttagaaggttagtttatttattggggttttagtttttttatttgtgaaatgtggattaaagtaatatattttaatggtggtggtaagaagtaaatgaaataatgtttataaatatatatatttgatatgtaattggtttataaataatagttatttttattattgggttttatttttgagttaaattgaataattatagattttgaaaatagtttattttatatttttagtatttgtatggtggttttttttattaagaaagttttttttgttttgttattttggtaaatttttgattttttattaggattgaatttaaatgttatttttgtttatatagttttatgttttttttttttttttttttatttttataatttaagtatgttgtaggttaatttgggaaggggttatggtttgtttattattaatattttggtatttagttagagtttagtatgtggtttatttagtgaaagtttaatttagtaaagatagtaaggaggttagagtaggttttattatttttattttttagatgaggtttaggagagttaagggatttattgaggttttttagtaggtaggtggtagatatgtgattataatttaaagttatgtggttgtaagtttattgagggtggggaggaaggggtaggtgtatttagaggtgtgggttttttgagtagtggtttggatgatttagggattttttgttttaaggtagtttggttgtttttattttttggatttttggtttgggtgttatttttatggaatgttaaatttgtaagagtaagggaataggtagttttggagaatagattggtaggggggttaggggggttgtggggtgttggttttttatttagagtttgggttttgggtttggggttatttgtttttttggtttgattgttgtatagtaatttttgaaagaatatagttgtgtagttataaagatatagttattaattttagttttgttagttatttattttgtttttgggtttgttatattattttttatttttatttttatttattttttgagatagttttatttttttgtttaggttggagtgtagtggtgtaattttagtttattgtaatttttgttttgttgggtttaagtaatttttttgttttagttttttaagtagttgggaatataggttgtattattatatttggttaatttttgtatttttagtagaggtggggttttgttatgttggtttagttggttttaaatttttgattttaggtgatttatttgttttaggtttttaaagtgttaggattatagttatgagttattatgtgtggttttatattattttttgaagttttagttttggttaggtgtagtggtttatgtttgtaattttagtattttgggaggttgaggttaagaggttttatagattatgaggattatgaggttaagagattgagattattttggttaatatggtgaaaatttgattttattaaaaatataaaaattagttgggtatggtgatatgggtttgtagttttagttatttaggaggttgaagtaggagaattatttgaatttgggaggtggaggttgtagtgagttgagattatgttattgtattttagtttggtgatagagtaagattatgttttaaaaaataataatagtaataaagttttagtttttttatttgtattatgagggtaggtgtgttttgttgatatttgtattttgttgtttgaaatagtatttattatttaagtgttaaataaatgattgaatggggataatggtgttgattttgtagagtattgaatgaaggattttgttttaggagttttttggttttttagaggttgaagatttatattttttttttttttttagagagtattgtttatgaggatagatgtttagggttttagattattgtttttagttttgagatgttagaaatgggttttaattggtattatttttttttatttaagtaattttgttttagaaagaggggtttagggtagtgtttggagaagttgggtagtagatggagaaggatagtatgtgttttataggtaggaagtagttttaggagttgggttttgagtttagtattggtagttttgtttattgttggaggttgggggttaggtgttagggttggttggtattgttagtttttggtaaagattggatgagggttttgtaggataaggagagtttgttaatatttggagttttttttggagtattttttatttgggttagtgtggttttagtttttttttatttttgagttttttttttatttggtggaagagagagattttggttttaattttggttttgatattaatatataagtttgagtttttagttgttttatttgaaaataggggtaataatttttattttgagaagttgttgtgagaattaaagtggggtgatatttgtaaggtagagtgggtggtatatagtaaagttttgtatgtggtagaattgggtttggggataaggttattgtttttaatagggttaagtgaggtttaggtagaatttttatttatgttttttatagattattttatttgggttgtattttgggttaggttttgttttttagtggtttatttttagtagtattaagggagggtagggtagtttagattttaggtttttgtgaaaagttttttattagttttttatttgttttttttttggttaggagttgttagtagtggtggtgtttgtatgtgtaggttaggtggttgtattgtttatatgttatttgggttaagaatagtgaggttttgttttttagtgagaatagtttaatttgtgttgtggttgttttgtggtttttgttatttaaataataatatttagttgtttggtatttttaggagtgggggaggggggattagataatagtatttagtgttttgtatttttttaggtttaggaagtggaggttagaatttagtatttgttattggagaagtagaggtttagataggttgaggattgattgaggattatatattgtttttggagtgaagtttttgaggaaattgtgtttttttgttttattaattttaggaagtttgttggttttttttttttatagatttgagatgttatagaatttaaaattgagatgagttttttagttaaatttggttttttggtgaagttggtttttgttttaggattttttaaagagaagtaggaagtggtgttttaggattgagtttttgggtgtttattttttttattagtataaagttattttttagttttttttagttttatttttttttttggaggtttggttttaggggtgtgtttgggtaaaggaatttatttttgagtattatttttaggattttgtgttttggttttagtagtggggtggtagtataggggttgtagagggtagtgttttttattttagagggtgagttagtgagagaatttttgagtagtttagtagtgtttgtaaaatttttatggtaggaattttagagtaatttattttaaattgtttttttaggttggttatttaattttgttgtgtttattttttaatagttagtgttggttatttttttaaaggggtagtatattttgggggttggggattttgggtgtttattttgatttaagtttgtggttttgagaggtaggatatttggtggttgttttaggtaagagagggtagaggaggggattgagataggggttttaggtttaagttgggagaaagttattttagtttttgggtttaaatgaggtttttattttttttttgtatatttttaataattatttgggaaggagaatattatttgttttttttttagtaagaggttaaggaggaagttttttattagtttatttaggggtttgattttgattttggggttaaaaggtataggaagaggtggttttttgtatgtttagggattggagttatagagtttttaagggaggttaggagttgtttttgagagagaaggagttgggttgtttggggagtttgggttggtagaagttaaattttttaagggtttagttttttttattggaaggggtataagaagggaggtaggtattaaggtttttttatgttttgttaggaattatttttataaggtttaagggtttttttttatttttgtttttatagtttggggtagggtatataggtgttttttggttttagttttagggtaaagaaaattaggagttttagttttagatgggtggtgttattttatattttgtatttgttaggggttaagaggagtaatttttttaggtttagtagtggtgaagttagaagtagggagtttttggtggagggttttgggagaagtgggggttttataatttttgtttttggtagaattttagatatttggtattgaagatttttttgtttgtattaatggaggaagttttgatagttttggatagatgttgggatgggttttaggtgtggggtgaaggtgattagattttagtgttttataggatttttttttttggttatggtggggaggtagttggtgtttggtggaattgttttttgtatatgtatatttgggtataggggggtggagttggatagtgggtaagagattggagggtatttgtgtttttgtgggtgtttgttggattgtagtggtgttttgggttgttttgtttttgtgaggatttgggtttgttggttgtgggtgtttgttttttgttttgtttatttatttttgggtttagaggtattagttttatgagtggttagggttttttgagttgggtgagtggtattttgttgttgttaggttatttgtgtttttttggtggttttggttgtgttgttttttgggttttggggtttttggttttgtgatttgaattgttgtgtttttttgagttttttgtgttttggttgggttgtttgttgttgttgttgtggtattagtattttggttttttttgttatttggtgttgttgtgtttattggttatttgtgtgggggtggagttggagaagttttgttttagtttttgtggtgtggtatttttagtgtggatttttgtttttgttgtgttttgagggttggttttgtttttgttgtgagtttttggtttgtgtttggttttgttggagaggttttgttggtttttttttttttagtggtgtatttttggatatattatattagggttattgtttttttttgtttagtttttttggaattttagtttagatgttttttttttttttaatgggagagaagtattttatttttgattttagtatatatatttatattgggtttttgggtttgatttaggttgaggtttggaaggagtttgagatttattttttttaggtttttaatttattaggttttagagattttttattttttaatttttattttgttttgaagttaatattgtgatttttgggtgattttagtgttttaggttaagatgggtattagtagttgttattattattaggatttatagtgttattatagagtgattgattgattgattgattttatataatgtatataaatattatatatataaataaatatgtataaataaatattatatatatgtatatatatgtatgtatgtgtgtatatagtgagagagagagagatatgaagttttgttttgttatttaggttggtttttgattttttggtttaagtgatttttttgttttggttttttaaagtgttgggattataggtatgagttattgtgtttggttaagagtgattttttaatatgtgtttttgtaatttgtgttttgttttattatttgaagggggtttttttaggttaggtttttttggagttatttgtagttttagttttggattagtttgggtttgtgattttttgaggagggattaggtttttaggatgaattgaggtttggtgggatttggagtgaaaggttagggagattggttgttttagagagatttagtttttatttaaagagttttaggggtttgggtgtgttgagatgtatttatatgtgaggagtgagtttgttggagggataagtttgttggttttgtaggaagattggttagtt

SEQ ID NO: 728 - DNA, 6211 bp, Artificial Sequence; identical to SEQ ID NO: 726
  chemically treated genomic DNA (Homo sapiens)

SEQ ID NO: 729 - DNA, 6211 bp, Artificial Sequence; identical to SEQ ID NO: 727
  chemically treated genomic DNA (Homo sapiens)

SEQ ID NO: 730 - DNA, 6198 bp, Artificial Sequence
  chemically treated genomic DNA (Homo sapiens)
tgtttaggaaggaaaggagttgttttgtagaaggtgttggggtttgagagattagttagatatgattggtagggagagtatgtgtgtttttatgaagaattatgataagataggtaatagatgaggaagaaatttgggtttgattgaagtaatgggggttgtttgtgaagttttgaggtagtatagagttaggatgagttagaaggaggaattttataaggtaatgttattagttaaggtaggaattagttatttggatgtgtaagtgtaggttatagaggatatgatggtttagtttgggtttagaggtttgatattaatttttttagatttagtatttgttaagttataaattttttattatatataaaaagtttaaaagtaattttaggttgggtatggtggtttatgtttgtatttttagtatttggggaggttgaggtgggtggattatttaaagttaggagtttgagattagtttggttaatatggtaaaattttgtttttattaaaaatattaaaaattagttgggtgtggtggtatatgtttgtaatttttgttatttaggaggttgaggtaggagaattgtttgaatttaggaagtggaggaggttgtagttagttgagattttattattgtattttggtttggagtaagattttattttaaaaaaaaaaagaagtaattttaatagaatatttagtgtttagatattagtttttaatattattttaaagtaaaataattatagtgttttggagaaatggattattttaaggttgggatatggaaaatataaaataagtttgagtattttttgatgttagaaattaagaaatgtattaaaaaagaaaaagagtttgggtatgatagtttatatttgtaattttagtattttgggaggttgaggtgggtagattatttgaggttaggagtttgagattagtttggttaatatggaaaattttgtttttattaaaaaatataaaaagtagttaagtgtggtgttatgtatttgtaattttagttatttggtaggttgaggtataagaattgtttgagtttgggaggtggagggtgtagtgagttgagattgtgttattgtattttagtttgggtgataaagattttgttttaaaaaaaaaaaaaaaaaaaaaagaaggaaaaagaaaaagtaagtgtatgttaaagtggtataggtgttaatttgaaaaaggttttagtggtgaaagttagaataatttgagtagtaaattaaatattgataatattggattataatttatataataaaataaatatttatgagtttatattgatataaataattgaattaatgaataggagagaagggttaatttttttttatagaagggaattttaattaaaaaatgtagaaggaagaaaataggggttttgtttaattattaggaaaaaaaatttgttaaataatatgttttataaatggatgtttaaattaatgaataaaagtttaaggaaaaatggtagtgtaggttttttttttaagattttaaatataaagggaatttggtaaatagattaatattataggtaataagaagtattggttagggtatagtggtttatgtttgtaattttagtattttgggaggttaaggtaggaggattattagaggttaggagtttgagattagtttggttaatatgaaatttgtttttattaaaaatataaaaaattatttgggtatggtggtaggtgtttataattttagttatttaggaggttgaggtaggagaattgttagaatttgggaggtaaaggttgtaatgagttgagattgtgttattgtattttagtttgggtaataaagtaagatttagttttaaaaaaaagtattgatattatgtatttaatatgatatattgagatggaaattttatttttgtgatatttttttttaaaatgtagaatatttatttaattatgatattaaatattaagtaaatataaattgaggggtattttataaattaattgattgggttttttttattagtgttaaggtttatgaaaaaataatgaaaggttgaggaattgttatagattagagaaaattaaggatatttagtagttaaatgtaaagtgagattattgattggattttgggtagaaaaaggatagtggaaagataagtgaaatttaaataaagtttgtagtttagtttattgtattatagtagtatgtttatgttattagttttggtttttgttatgtatgatattatgggaattttttgtattattttttgtaaatttttagtaatttttaaattattttataattaaaagttattataaaataaataataaaataattaatattttttaatgtttataatggaagggtaatgttagatttaatatgttatttttgttgttgaaattttttttattaagattttattaagatttatataatttagttaaagttgtattttgaaagtattgttttgtaaagaatattaataaaaaatattttttttttattattttggtgtatttatttatgattagttgatatttaaatgataagagagttgtaagatttttttaaaaattaagttttaggggatatttttaggattgagaagggagtaagagtatttaattatttatagaaaattataaaagggagtttaataattttttagtaaattatttaaagttttaaagggattgattaataatttgttatttatttatttttaattgttattgattaatttttatattggttaatttttttaaaatattaatattaataaatgttttttttatttatagtaatttttgtgtttagtgggtttttatttttttaatattaattttaattttatatatttggagaaaggttaagagtttttattaatttatatttaatatattatgggatttagaattagtttgtattagggtattattttttgaaaaattattttgaattgttagttttaaattgtatatttatttttaaatgaaattgtgaaaggttaaaaaatttagttgttttgtttgaatggttattgattttttaataaatatatatataatgtttattaatttttttagatatatatttttagtgaaattggttttataatttatttatttagtttaatagagtttggttttaattaaaggtttaggattttaggatgtgtgtgtttggaggtagtgttttaataattaaggatgtaaatgttgggatgagttatttggattttttaaataaattttaaagtagtagtttttatttaataagattattaagtatgtgtatggtgtgtttttaaattttatttagtttttttataggttgtttttttgttgtgttttttaattttagtgggagtggtgggtattgtttttttttttttgtgtgtttggaattttttgagtgggtatagtatgtagtttgtgtgtggtataatttttttttttaattatatttggtgtgtttgagtgttttttttgtgtggtggttggtgtgggaggtgttgtggttggaggttatgatgggagttggtgggtggttgtttggggagatttggatatttaggggatgagtttaggtagtgttgatatgaattttttaagttgtgttttgggttgtggattgttagagttgaatgtagtggtttttttttagtgttttgggtttttttaggttggggtttgtgggtgggggtgaggtgtggttttgattgttgggttgtgataagtgttttgtgatttggttgaaagtgtatatgtgttttgttgtgttgagttgttagtaggattggtattattgtttttttttggggttagggttattttgttgtgatatgtagggataagttaaatatttttgtttttgggattgaatggaatgaattagagtgattaattatgagaattattaggtgtttattgggttgattagtattttgtttgatttagttgggtttggttgttgttattggttggagtgttgaagtattggggatgttgatgtataggttgtttagttataagtgttgtttgtatttagagtaagttaaatgggtggtttttggtgaatgggattttgagaaagtggatgtttgtgttttagggtttaaaaaaattaggtattgaatttaatttaaggaaggaaaggggagaaatttattgaatgaaaatattattatagtttaaatgttattttttatatttttgtgattgatatatttttgtgtaatattttgatggtgtggaaaggttagaaagtgattgtgtatgtttaggaaatgggttattaggttttgtgagtgtagttattttaatatttatttgttgtatttattttaggaaattagtatttgtatgtagatattttttggtttgtatttataaataaaaattatagtattatttaagttgtttaaattaatattaggaataattattaatggtttatttaatgtaggaaagttttagttaggaagtttagataagaaaattgattatatataattttttaaaaagaattttaaatatattatattgtatgttttttaaaagaattttaaggtatatatttatgatgtgtttaaatatttgggtaaaattatttttttgaattaatttttgttagttttaagatttttaaaggtttatatagaaatatatgttagttatattttattttaagataaaattaaggttagtatggtggtttatgtttgtaattttagtattttgggaggttgatgtaggtagattatttgaggttaggagtttgagattagtttggttaatatggtgaaattttgtttttattaaaaatataaaagttagttgggtgtggtggtgaggttgtaattttagttatttgtgaggttaaggaataagaagtgtttgaatataggaggtagaggttgtaaatgatttgagattttattattgtattttagtttgggttatagagtgagattttgttttaagaaaaaaaaaaaaattaagataaagtttttagatttggttgttaatgattgtttgtaaaaattgaaaaatttttgaaaaataaattttattttaattttttttttagtttatttagataagtgaaaagaataaaattttatgatattagaaaaaatgaaaatatttttagtaagatttgaaggtattataggaggagattgaataaaaatggagaaaatatatatgaaattgatatgaagtatatttttaaaaatggatatttagttgaatatagtattttgtaattatgtaaagtaaaaataaattaaaattttatatatagaggttaggtatggtggtttatgtttgtaattttagtattttgggaggttgaggtaggtggattatttgatattaggattttaagagtagtttggttaatatggtgaaatttttttttattaaaaatataaaaattagttgggtatggtggtttatgtttgtaattttagttatttaggaggttgaggtaggagaattgttggagttagggaggtagaggttgtagtgagttaagattatgttattgtattttagtttgggtgataatgtgagattttattttaaaaaaaaaaaaaaaaaaaaaaaatttatatatagaaaattgttgggtaaggagtgatagtttatttttgtaattttaatattttgggaggtagaggttaaagaattgtttgagtttaggagtttaagattagtttgggtaatatattgagattttatttttataaaaaaaaaatattttaaattatattgggtgtggtggtttatatttgtaattttagtattttgggaggaggttagaggattgtttgagtttaagaatttgagataagtttaggtaatatagggagtttttgtttttataaataatttttttttttaattttttttttttttattatattttaagttttagggtatatgtgtatattgtgtaggttagttatatatgtatatatgtgttatgttggtgtgttgtatttattaatgtgttatttagtattaggtatattttttaatgttatttttttttttttttttgattttattatagtttttagagtgtgatatttttttttttgtgtttaagtgattttattgtttaatttttatttatgagtgagaatatgtggtgtttggtttt

SEQ ID NO: 731 - DNA, 6198 bp, Artificial Sequence
  chemically treated genomic DNA (Homo sapiens)
aaaattaaatattgtatatttttatttataggtgggaattgaataatgagattatttggatataggaaggggaatattatattttggggattgtggtggggttgggggaggggggagggatagtattgggagatatatttaatgttagatgatatgttagtgggtgtagtgtattagtatggtatatgtatatatatgtaattaatttgtataatgtgtatatgtattttaaaatttagagtataataaaaaaaaaaaaaattaaaaaaaaaaattgtttgtagagataggggttttttgtgttgtttaggtttgttttgaatttttgggtttaagtaattttttggtttttttttaaagtgttgggattataggtgtaagttattatatttagtgtaatttaaaatattttttttttgtagagatagggttttagtatgttgtttaggttggttttgaatttttgggtttaagtaattttttggtttttgttttttaaagtgttgggattataggagtgagttgttattttttgtttagtaattttttatgtataggttttttttttttttttttttttttgagatggagttttatgttgttatttaggttagagtgtagtgatatgattttggtttattgtagtttttgtttttttggttttagtaatttttttgttttagttttttgggtagttgggattataggtatgagttattatgtttggttaatttttgtatttttagtagagaagggttttattatgttggttaggttgtttttgaagttttgatattaggtgatttatttgttttggttttttaaagtattaggattataggtgtgagttattgtgtttggtttttatgtatagggttttgatttgtttttattttgtataattatagaatgttatatttaattaagtatttatttttaaaaatgtgttttatattagttttgtgtgtgttttttttatttttgtttagtttttttttgtagtgtttttagattttgttggaaatgtttttattttttttggtattataaaattttattttttttatttatttgggtgagttaaaaagaaaattaaaataaaatttattttttggagattttttagtttttgtaaatagttgttaatggttaggtttgaaaattttattttaattttttttttttttttgagatagagttttattttgtggtttaggttggagtgtagtggtgggattttgggttatttgtaatttttgttttttgtgtttaagtgttttttgttttttagttttgtgagtagttgggattatagttttgttattatatttagttaatttttgtatttttagtagaggtagggttttattatgttggttaggttggttttgaatttttggttttaagtgatttgtttgtgttagttttttaaagtgttgggattataggtatgagttattgtgttggttttaattttgttttaaaatgaagtatgattaatatgtatttttatatgggtttttaagggttttgaaattgatagaaattaatttaaaagaataattttatttaaatgtttgggtgtattatgaatatatattttaaaatttttttaaaaagtatgtggtatggtatatttaaaattttttttaaaaaattatgtatagttaatttttttatttaggttttttagttaaaatttttttgtattgggtgaattattaatagttatttttagtgttgatttaaataatttaaatgatattatgatttttgtttgtaaatgtaaattagaaaatatttgtatgtaggtattaattttttagggtagatgtagtaggtagatgttgggatggttatatttataaagtttgatggtttgttttttgaatatgtgtaattattttttagtttttttatattattggaatattgtatagaagtatgttagttataggagtgtaaagaataatatttaaattatggtaatatttttatttagtaagttttttttttttttttttttgggttagatttagtgtttgatttttttaggttttggggtgtaagtatttatttttttagaattttatttattagaaattatttatttaatttgttttgggtgtgagtagtgtttgtgattgggtaatttgtgtgttagtgtttttggtgttttggtgttttggttagtgatggtgattaaatttagttaggttagatgaggtattgattagtttaatgagtgtttggtgatttttgtagttaattattttggtttattttgtttgattttggaggtgggagtgtttggtttgtttttgtgtgttatggtagggtgattttagttttgagggagggtggtggtattagttttgttggtggtttagtgtggtaggatatgtgtgtgtttttagttgggttgtagggtgtttattgtggtttggtagttggggttatgttttatttttgtttgtgaattttgatttggggaaatttggggtgttggggaggggttattgtgtttagttttggtggtttatagtttgaagtgtggtttaggaagtttgtgttagtgttgtttgagtttgttttttggatgtttgggtttttttaggtggttatttgttggtttttattgtgatttttagttgtagtgttttttatgttggttgttgtgtgaggggagtgtttgggtgtgttgggtgtggttgggggaaggggttgtgttgtgtgtgggttgtgtgttgtgtttatttaaaaggttttgggtgtgtaggagggaagaggtagtgtttgttatttttattgagattgagagatgtggtaaggaggtagtttgtggaggaattgggtaggatttaggaatgtattgtgtatatgtttggtggttttgttaagtggaaattgttgttttagagtttgtttggaaggtttgggtgatttattttaatatttatatttttaattgttaaagtgttgtttttgagtgtatgtattttgagattttgagtttttggttaagattgagttttattaagttgagtgagtaaattgtaaaattagttttgttgagagtgtgtgtttggaaaggttggtgggtgttgtgtatatatttgttagaaaattggtaattgtttaaatgagatgattgagttttttagttttttgtagttttatttgaaagtgggtatgtagtttaaaattgatagtttaaagtggttttttagaaaatgatgttttggtgtaaattgattttgggttttatagtgtgttaagtgtgggttggtaaaaatttttggtttttttttaaatgtatgaaattaaagttgatattggaaggataaaaatttattgagtatagaagttattataggtggaggaaatatttgttgatgttaatattttaaaggggttgattaatataggaattggttaatgataattgggaataggtaaatgataaattattggttaatttttttaaagttttggatggtttgttaaagaattattgaatttttttttgtaattttttgtggatagttgagtgtttttattttttttttagttttagagatattttttaaagtttggtttttaggaggattttatagtttttttattatttgaatgttagttagttataaataaatatattagagtagtaaggaagagatgttttttattgatattttttataaaatagtgtttttagagtatagttttgattggattgtatagattttgatgagattttgatgagaaaggttttaatgataaagatggtatgttaagtttaatattatttttttattataaatattgaaagatgttggttattttattatttattttataataatttttaattgtgaaataatttgagagttattgaaaatttgtaaaaaatagtatagagagtttttataatattatgtataataagggttaaaattaataatatgggtatgttattataatataatgaattaaattatagattttatttggattttatttgtttttttattgttttttttttgtttaggatttaattgatgattttattttgtatttaattgttaaatatttttaattttttttgatttgtgatagttttttagttttttattgtttttttatggattttgatattagtgaagaagatttggttagttaatttgtagaatgttttttaatttgtgtttgtttgatgtttagtgttatgattagatgaatgttttgtattttggggaaaaatgttatagaagtaaagtttttattttagtatgttatattgggtatatgatgttaatatttttttttgagattgagttttgttttattgtttagattggagtgtagtggtatgattttagtttattgtaatttttgttttttaggttttagtgatttttttgttttagttttttgagtagttgggattataggtgtttgttattatgtttagataattttttgtatttttagtagagataggttttatgttggttaggttggttttgaatttttgatttttagtgatttttttgttttggttttttaaagtgttgggattataggtgtgagttattgtgttttagttgatattttttattatttatgatgttaatttgtttgttagattttttttgtatttgagattttgggagagaaatttgtattgttatttttttttaaatttttatttattaatttaagtatttatttgtggaatatgttgtttagtgggtttttttttttaatggttaaataaaatttttatttttttttttttatattttttaattaaaatttttttttgtagggaagagttgattttttttttttgtttattgatttagttatttgtattagtatgggtttatggatatttgttttgttatatgggttataatttaatattattagtatttaatttgttgtttaaattgttttggtttttattattgggattttttttaggttggtgtttgtgttattttgatatatatttgtttttttttttttttttttttttttttttttttttttttgagatggagtttttgttgtttaggttggagtgtagtggtatgattttggtttattgtattttttgttttttaggtttaagtgatttttgtgttttagtttattaagtagttgggattataggtatgtagtattatatttggttattttttgtattttttagtagagatggggttttttatgttggttaggttggttttaaatttttggttttaagtgatttgtttgttttggttttttaaagtgttgggattataggtgtgagttattatgtttggatttttttttttttttaatgtattttttgatttttggtattagagaatgtttaggtttattttgtattttttatgttttaattttggaatgatttatttttttaaggtattgtgattattttgttttagaatggtattagaagttaatatttggatattggatgttttattagagttatttttttttttttttgagatggagttttgttttaggttagagtgtaatggtgggattttagttgattgtaattttttttgttttttgggtttaagtaatttttttgttttagttttttgagtagtagggattataggtatgtgttattatgtttagttaatttttaatgtttttagtaaagatgaggttttgttatgttggttaggttggttttgaatttttgattttgggtgatttatttgttttggtttttttaagtgttgggaatataggtatgagttattgtgtttggtttagagttatttttgaattttttatgtataataaaaagtttgtgatttagtaaatgttaagtttgaaaagattggtgttaggtttttgagtttaagttaagttattatattttttgtgatttatatttatatatttagatggttggtttttgttttaattgatgatattattttgtgaaatttttttttttggtttattttggttttgtattgttttaaggttttatagatagtttttattattttagttaaatttaaattttttttttatttgttatttattttgttataattttttataaaaatatatgtgttttttttgttaattgtgtttgattgattttttaaattttaatattttttataaaataattttttttttttttaggta

SEQ ID NO: 732 - DNA, 6207 bp, Artificial Sequence
  chemically treated genomic DNA (Homo sapiens)
attggttttgaatttttgattttaggtgatttatttgttttagtttttttaaagtgttgggattataggtgtgagttattatatttagttttatttagtatattttgaataaattaataaatttggggtgaggaaatagagttatattaatatagttatagttttagtaagtagagttggggtatttttaatttatatattgttgttgaatgaatgaatgaatgaatgaatgaatggggagaataaagtggttggaatttagatttttttgtattggagttatttttagaatagtgttttttattgaaaattttaaggttttatttttttgtttttttttttatttgttgagggtttataatgatgttgttggattttgttttgggttttagggtttggttgggtgttttttttgttaggggttttgattttgtggggtatgtggttttagttttttttagaggttgtgagatggtatatttggtgtaggtttgaggggttgtttgggttgaggtgtttatagtgggaaggttttgtgtagattggaataagggtttggtttgtggggagaaagggagtttgtaggggattggttggggtgagtagaggatatttgaggttttgtgagttttttttttttttttttttttttttttgagatagttttgttttgttatttagattggagtgtagtggtattattttggtttattgtaatttttattttttgggtttaagtaattttgttttagttttttaagtagttgggattataggtgtttattattatgtttagttaattttttttttttttttttgagatggagttttgttttgttatttaggttggagtgtagtggtgtgattttggtttattgtaatttttgttttttaggtttaagtgatttttttgttttagttttttaaatagttgggattataggtgtgtattattatgttggttaatttttgtatttttagtagagatagggttttaatatgttgtttaggttgattttgaatttttgattttaggtgatttgtttgttttggttttttaaagttttgggattataggtgtgagttatagtatttgattttttttttttttttagggttgtttattttttttttttttaatgttttttttagaaggttgagagtttaaaatttgaatttagttattttttttttattttttagtttttattttggttttagttattagtgttttatttttggattattgaagttatttttttattagttttttgtttatatttttgttttttggaagtttgttttttaattaagtttttatgttttttttttgtttagagttggtgggtggtttttgttttagagtgaaagttaaagttgttattattatttataaggttttagatttgtttttgttttttgttttagaaattatattttttattatttttttttgttttttttattttagttttattagattttgttttgtttttgaatatggtaggttttttttgattttagggttttggtattggttgttttttttattttagatgttgttatggtttatttttttattttttttatgtttttattaagatgttatttttttagagaggtttttttttgatttttttatttaaagtaggaaggggttaggtatggtggtttatgtttgtatattttagtattttgggaggttgaggtgggtggattatttgaggtttgagattagtttgattaatatggtgaaatttgtttttattaaaaatataaaaattagttaggtgtgtttttgtaattttagttatttgggaggttgaggtaggagaattgtttgaatttaggaggtagaggttgtagtgagttgagatggtgttagtgtattttagtttgggtaaaagagtgagattttgttttaaaaaaataaataaataaataaataaatagagtaggaaggtttttttttttattatgttttatatttttagtttattttttttttttttatagttaatgtttattatttgttgattgtttttttttgggaaggagattttaatattgttaggtttttttatttattaaaatatgtttaaagtgtagatttttttaagattgtaaaatttggtgatttttaaatatgagtaataaatttatgttttgaaaaattagggtgttggttttgtaaaatatattaggggttatttgttgaatgttagtgtttggtttttgttttagtttttttttagaattatttatttattttatagatggggaaattgggatttggggaggattaaggattgtttttttaagttgtttgtggtttttaaatttattaatttatattttggttttataggttttattttattttttttgttttaatagtttttagttttttaggggttttgtatttttttgttttattattttaggagggattttatttttgttgaggggtattataaattttttttttgttggtggttttgagggttggggtattttttttttgttttttttagggtttatttggagtttgaaagggaaggtgttaggagtgagtgagttattggtgtttatgtttttattttgtagtaggaattttttatttatagttgttttttataaaattttgagagttttatagtgttaggtttttaatatttagtgttagaggttttgtaatgttatgtttttttgatttttatttttggtttgttttgttttttataggtttataagttttattgttttgttttttgtttttattggattttattggttttgtttttattattttttgttttttgtttgtttggtttttgaggttagtatttggatgttttttttatgtttggttttgtttattttttagatttggtaatgattggtttttgtggtgttaatttttatttgtagtttttgttttttgtatttgtggtttgggttttatggttttagtgttgtgaggttttatttgttggttttggagttttaagggaaagattgtagagggattgaggtggtttattgttagtatggttagtgtggtttagggtttgtagtatttttggtttttttggttttgttttttaggagagtagagtatagagtagggtgatttttgtataattttttatggttttggaggattgtggaggttgtgggaggagagagatgtggtttgaggatttggtttttaaattgttaagttttaaagtttttattgagtgtttttgtgtgtttagaattttggtagggtttagtggagaatagattgtaggagatttaatttggtttttttttttagtaaggagagatttaagtttgaatttaatttagatattgatttggttttagtttttttatttatttatttattttatatttattttttttatgtgttttttttttttttggttttgtgtgagtttgtgttggtgatatagtagtgattaatgatagttttgtgttgtttttttggagtttatggtttagtaagggatatagatatgtttttagtgttgatttagaatgggtaggtttgggatgggagattttgggagagttgtgggatgggggttagggggagtgtttgatttagttttggagtttggaagggttttttggaggaagggatatttgagtaggggtttggttgatgagttagtattagttattttttgaaaggatagtattatattgttttaatttgtagttttttgattattaaggaaatggaatgttttttgtgaaagtattggttttgtaaattttgttttttgtgaattgtttgtttatattttttgtttatttttaaaatgggttgtatggtttttttattattattaatttttaggggtattttatggattttgattttaatttttagttatttatattgtaaatatttttttttagtttttattttgggttttaattttagttatttttggtatagaagttatttgtgtttatgtgtaattatttattaatttgttttgttttgatttttgtttttggtgtgttaagagttttgttataatttagggttataatgataaatttttttttttttttttttttttttttttgagatggagttttgtttttattatttaggttggagtgtaatggtgtgattttagtttattgtattttttttttttgggtttaagtgatttttttgtttttttagtagttgggattataggtatgtgttattatgtttggttaattttttttttttttttttttttttgtatttttagtagagatggggttttattatgttggttaggttggttttaaatttttgattttagttgattttgaggttattttgtgattttttaaagtgttgggattatagtgtatggttataatgatatattttattattttttttatttatgtaaaagataaaagttttgtgttgtttttttagagtttatagtttagtgagggatatagatatggttttaaatagtaatgatttagaatgagtaggttatttggttttaatttatgtaagatttatttatttatttattattttttgagatggagttttgtttttgttgtttaggttggagtgtaatggagtaatttaggtttattgtaatttttgttatttatatttaagtagtttttttgttttagttttttaagtagttgggattataggttaatttttgtatttttagtagagatggagttttattatgttggttttgttggttttgaatttttgattttaagtgatttgtttattttagttttttaaagtgttgggattataagtatgagttatggtgtttggttaagatttatttttgaaagtgtattgaggttgttgtttatgagtgatgtaattaattgttttaagttgattaaaggtagattttttttttattgttttgaaattttatttttattatatattaaatttttatatatatatgtttatttttgatatttttgttatgtttattgatttttttatttatttttgtttgtatgtatatgatatttttttgtttttttgtttatattagttttttatttatgggtgtttatttgtgtttatatttttttattttatttaattttttttttttgggtatggtggttaatgtttgtaattttagtattttgggaggtttaggtgggtggattatttgaggttaggagtttgagattagtttgattaatatggagaaattttatttttattaaaaatataaaattagagttttggtgtagtggtttatatttgtaattttagtattttgggaggttgagataggtggattatgaggttaggagtttaagattagtttggttaatatggtgaaattttgtttttattaaaaatattaaaattagttgggtgtggtagtgtatatttgtagttttagttatttaggaggttgaggtagaagaattgtttgaatttgggaggtggaggttgtagtgagttgagattgtgttattggattttagtttgggtgatagagttagattttgttttaaaaaaaaaaaaaaaaaaaaaaattagttgggtatggtggtatatgtttgtaattttagttatttaggaggttgaggtaggagaattgtttgaattttggaggtaaaggttgtggtgagttgagattgtattattgtattttagtttgggtaataagagtgaaattttattttaaaaaaaaaaaaaaaattttttttgagataaggttttgatttattgtttagatttattgttttgaattttgtttattttaaatgtttttttttttttattttaataattgaaatttagaattttaggttgggtgtggtggtttatgtttataattttaataatttaggaggttaaggtgggtagattgtttgggttttagagtttaagattagttagggtaatatgataaaattttatttttataaaaaaatataaaaattggttgggtaaggtagtttatgtttgtaattttagtattttggaaagttgaggtaggagaattatttgaatttgggaggtggaagttgtagtgagttaagattatgtaattgtattttagtttgggtgataaaagtgaaattttatttaaaaaaaaaaaaaaaaaaaaaaagttatgtgtgttggtgtgtatttgtagttttagatatttaggaggttgaggagggaga

SEQ ID NO: 733 - DNA, 6207 bp, Artificial Sequence
  chemically treated genomic DNA (Homo sapiens)
tttttttttttagttttttgagtatttgggattataggtgtatattaatatatatagttttttttttttttttttttttttagatggagttttgtttttgttgtttaggttggagtataattgtgtgattttggtttattataatttttattttttgggtttaagtgatttttttgttttagttttttaaagtgttgggattataggtatgagttattttgtttagttaatttttgtgtttttttgtagagatggggttttgttatgttgttttggttggttttgaattttggagtttaagtaatttgtttattttggttttttaaattgttgggattataggtatgagttattgtatttagtttagaattttggattttaattgttagggtgaaaagaaaaaggtatttgaggtaagtaaggtttaggataataaatttgggtaatagattaagattttgttttaaaaaaaattttttttttttttttgagatggagttttatttttgttgtttaggttggagtgtaatggtgtgattttagtttattgtaatttttgtttttagggtttaagtaatttttttgttttagttttttgagtagttgggattataggtatgtgttattatgtttggttaatttttttttttttttttttttttgagatagagtttggttttgttatttaggttggagtttagtggtataattttggtttattgtagtttttgttttttaggtttaagtgatttttttgttttagttttttgagtagttgggattataggtgtgtgttattatgtttaattaattttagtatttttagtaaagatggggttttattatattggttaggttggttttgaatttttgattttgtgatttgtttgttttggttttttaaagtgttgggattataggtgtgagttattgtattgggattttaattttgtatttttaatagagataggatttttttatgttggttaggttggttttgaatttttgattttaggtgatttatttgtttaggttttttaaagtgttaggattatagatattagttattatgtttagaaaaaaaaaattaagtaaaatgggaaaatgtagatatagatagatatttatagatgaaagattgatgtgaataaagaaatagagggatgttatgtatatgtaggtaagaataaataaaaagattaatgaatataatagaaatgttagaaatagatgtgtgtgtatgggaatttggtatgtgataaaggtagaattttagaatagtggagaaaagatttatttttggttaatttgagataattggttatattatttataaataatgattttggtgtatttttaaaaataaattttggttaggtattgtggtttatgtttgtaattttagtattttgggaggttgaggtgggtagattatttgaggttaagagtttgagattagtagggttaatatggtgaaattttgtttttattaaaaatataaaagttagtttgtaattttagttatttgggaggttgaggtaggagaattgtttgaatgtgggtggtggaggttgtagtgagtttagattgttttattgtattttagtttaggtaataagagtaaaattttattttaaaaaataataaataaataaataaattttatatagattaaagttagatgatttgtttattttaggttattattgtttgggattgtgtttgtgttttttattgaattgtaagttttgggaggataatatggggtttttattttttatgtagataaaagaaatgatagaatatattattatagttgtgtattgtaattttagtattttgggaggttataaagtgattttaggattagttgaggttaggagtttgagattagtttggttaatatggtgaaattttgtttttattaaaaatataaaaaaaaaaaaaaaaaaaaaaaattagttgggtatggtggtatatgtttgtaattttagttattaaggaggtaggagaattgtttgaatttgggagggggaggtgtagtgaattgagattgtgttattgtattttagtttgggtaataagagtgaaattttgttttgaaaaaaaaaaaaaaaagaaaaaaaagaatttattattatgattttgggttatggtagggtttttaatatattaaaagtaaaagttagaatggaatagattgataaatagttgtgtataaatataaataatttttgtgttaaaaataattaaagttaaagtttaaagtagaaattaggaggaaatgtttgtaatatgggtaattaaggattagaattagaatttataaagtatttttagaaattaatagtaataaaaaagttatataatttattttaaaaatggataaggaatatgagtaagtaatttatagaagataaaatttataagattaatatttttataaaaaatattttatttttttagtaattagagagttgtaagttagaatagtgtgatattatttttttaggaagtgattaatattaatttattagttaggtttttgtttagatgtttttttttttaggaagtttttttggattttggggttgagttaggtgttttttttgatttttattttatggtttttttgggattttttattttagatttgtttattttgggttagtattgggaatgtgtttgtgttttttattgaattgtaagttttgggaggataatatggggttgttgttggttattgttgtgttattagtatggatttgtataggattgggaagagaggaagtgtgtggggggaataggtgtggaataaatgaatgaatgaggaaattgaagttaagttaatgtttgagttggatttaaatttaagtttttttttattgagaggagggattaagttggattttttgtgatttgttttttattgagttttgttaggattttgggtatatagaagtgtttagtaagggttttgaaatttaatagtttgggagttagatttttaggttatatttttttttttttatgatttttgtggttttttagaattatagagagttgtatagagattgttttgttttatgttttatttttttggggagtggggttagagaggttggaagtgttgtgagttttgggttatgttggttgtgttggtagtgggttgttttgatttttttgtagttttttttttgaggttttaagattagtaggtgaggttttgtggtgttgaaattgtgaggtttggattataggtgtgggaggtggagattgtgggtggagattggtgttgtggaagttaattattgttgagtttgagagatggataaggttaggtgtggggagggtgtttagatgttagttttgggggttggatgaatggaaggtgggggatggtggggatggagttaatagaatttggtgggggtgaggggtggagtgatgggatttgtggatttgtaaggggtggggtgagttgaaggtggaggttaaaggggtgtggtgttatagagtttttagtgttgggtgttggggatttgatgttatggagtttttggagttttgtgggggatggttgtgagtggggggtttttgttgtgggatgagaatgtagatgttagtggtttatttgtttttggtatttttttttttaggttttagatggattttgggaaggataaagagggggtgttttagtttttagggttgttagtaaggaagaaatttgtgatattttttgatgaggatgaggttttttttggagtggtaggataaggagatgtggggtttttgggaggttgggggttgttaggatgaagaggataggatggggtttgtgggattagggtgtgggttagtggatttgggggttatggatgatttggggaaatagtttttggttttttttaggttttagtttttttatttgtgaaatggatgggtggttttaagagagggttaaggtagaggttagatattggtatttagtaggtagtttttgatgtgttttatgaggttagtattttgattttttaagatatgaatttattgtttgtgtttaagaattgttaggttttgtaattttaaaaaaatttatattttagatatattttggtaaatggaaggatttggtaatattgaaattttttttttaagggaaaataattgatgggtgatgagtattggttatgaagaaaaggaaagtgggttaaggatgtagggtatgatgggggagaggatttttttattttatttatttatttatttatttatttttttgagatagagttttgtttttttgtttaggttggagtgtattggtattattttggtttattgtaatttttgttttttgggtttaagtgatttttttgttttagttttttgagtaattgggattataggagtgtgtttggttaatttttgtatttttagtagagatgggttttattatgttggttaggttggttttgaattttaagtgatttgtttattttggttttttaaagtgttgggatgtataggtatgagttattatgtttggtttttttttattttagataggaaggttaagggagggtttttttgaggaggtgatattttggtagagatgtgaaagaggtgagggagtgagttatggtgatatttggggtagagggaatagttagtgttaaagttttgaggttagagagagtttgttgtgtttaagggtagaatgaagtttggtggggttggagtagagaaagtaaggagaagtggtagaaggtgtagtttttgaggtaaggagtagggatagatttagagttttgtgggtgatggtgatagttttggtttttattttgaggtaggagttatttattagttttgagtagaggagggatatgaggatttagttaggggatagatttttagggggtgagggtgtgggtaaggagttggtgaggaagtgattttagtggtttaagggtgaaatgttggtggttgggattagagtggaggttgaggagtgggggagaagtggttgaatttagattttgagtttttagttttttggaagggatattaggaggaaggaggatgggtagttttgaagaggggagaggggttaagtgttgtggtttatatttgtaattttaggattttgggaggttgaggtgggtggattatttgaggttaggagtttgagattagtttggataatatgttgaaattttgtttttattaaaaatataaaaattagttagtgtggtggtatatgtttgtagttttagttatttgggaggttgagataggagaattgtttgaatttggggggtggaggttgtagtgagttgagattatgttattgtattttagtttgggtgatagagtaagattttattttaaaaaaaaaaaaaaaaaattagttgggtgtggtggtgggtatttgtaattttagttatttgggaagttgaggtagaattgtttgaatttgggaggtggaggttgtaatgagttaagatagtgttattatattttagtttgggtgatagagtaagattgttttaaaaaaagaaaaagaaaggggagaggaatttatagggttttagatgttttttgtttattttaattagttttttgtaaattttttttttttttataggttaagtttttattttgatttatatagagtttttttattgtggatattttggtttaggtggttttttagatttatgttgaatatgttattttatagtttttggaaggggttggggttatgtgttttatagggttagagtttttggtaggagagatgtttaattaggttttgaaatttggggtaaaatttaatagtattattgtgagtttttggtaggtgaggagggagatggagaagtgaggttttgaggtttttagtgggaaatgttgttttagggatgattttagtgtaaggaggtttgagttttagttattttgttttttttatttatttatttatttatttatttatttgatagtagtgtgtgggttgagagtgttttagttttatttgttggggttgtggttgtattggtgtagttttgtttttttattttaggtttgttaatttatttaaaatgtattgaatgaggttgggtgtggtggtttatatttgtaattttagtattttggagaggttgaggtaggtggattatttgaggttaggagtttgagattagt

SEQ ID NO: 734 - DNA, 6229 bp, Artificial Sequence
  chemically treated genomic DNA (Homo sapiens)
gattgagttattagtttgatatttagaaggtgagaagttattttggtttttgttggaaggtggagatattgtttgtgttttggtgttaattggggttggatggggtaagaatgggggataagggtggttttgtaaatagtagtaaatttttgtaattaatttattattttttttttttttttttttttttttttttgagatagagttttattttgttgtttgggttggagtgtagtggtgtgattttagtttattgtaatttttgttttttaagtttaagtgattgttttgttttagttttttaagtggttgggattataggtgtttattattatgtttagttaattttttgtatttttagtatagatggggttttattatgttggttaggttggttttgaatttttgattttatgatttgtttgtttttgttttttaaagtgttgggattataggtgtgagttattgggtttagtttaatttattattttttataagtgatagttgtattgagttgttttttgaaggtggttgttaggttttgttttaggtatttgggattttgtttgtaggttttgttttttgggttgagaaggatgtattttggataagttatttgtgtttgtgttttttagtttttttgtattttttaagtgttttgtgttatttggttttatttttttttttatatttatttatttgaggggatggagttgaagttatttggttatttgtattggtttagtttggttataatttggagtgtttgtaaataattttttttatttataaaataatgtaattttagtgatggattggattttgaaggttattttttattattatagttgttatgtttaggtagtgtttgttttatatatagagtttgtttttaattttgttggttttagtttggagaagggatatgggagttggagttttgatggatgaataggtgtttattggatttgggtagaggggttatttgttttttaggtgggtattgataaaggaaggtataggttttatttggaattgttaaggtagtttttagaaatgtttggttgttttggggtatgttttagtatgttagttttgtgggattatgtttagttatttttagaaatatttagtgttttttttttttaggttttgttttggtttggttttgtttagtttattttggataagatgttgtgtgtttgaggtttagtagagtaagtttttggttgtgatgtgtttgaaatatttgttaggggttttttttatatgttagagtttttttgggatgaagtttaagttagaaaatttagttgaggtttaagtttgaattttagttttattgtgtggttttgggaaaatggtttttttattttgtgttttagtttttttgtgtttataagattaattttattgattgtttattaagtatttattgtgtgttaagtgtttttatgtggttttttttttagttagttttgagaaggttggaggtggtgttattatttttattttatagataaagtagttgagattttagtgaggggtggagatttgttttatgattatttagtaggagttgtggtagaatggagtattagttagattttgttgtgggtgttgttattaagggagtttgaatggagggtttggtgttagatatagttgattttagttttagtttattttttatgatgttgtgtgatttattgggtattttggtgagggagttttttagatattaatagtttattttgtttttttttttgagttttttgtttagtattgtttagtgttggagggtagattaaggttgtgtatgatttattttttttttttattttggagttggtagtgaataaaagtttgtatttataaagatgagttttaatgtttggatttgtgaggggttgagaaaggaggaagggaagagtggggaggggagtggagtgaaatagatttatggtttaaagttattgtaagtgggttttgaggattgtatagtagtttgttgttgagattttttttgatgttattgttggtattagttttttgttattttttttttgtgagtattttattatagttttgtttttaaaagttttttttagatatttgggttttgagttatgttttttatttttatgtttttgagataaggttttgttttgtaatttaggttggagtatagtggtgtaattatggtatattgtagttttgattttttgggtgttttgggttatgttaataaaataaataagtggtggggtgtggtggtttatgtttgtaattttagtattttggaaggttaaggtgggtggattttttgaggttgggagttttaaattattttgattaatatggagaaattttgtttttattaaaaatataaaattagttgggtgtggtggtgtatgtttgtaattttagttgtttgggaggttgaggtaggagaattgtttgaatttgggaggtggaggttgtggtgagttgagatagtgttattgtattttagtttgggtaataagagtgaaattttgttttaaaaaataataataaaataagtaattgttgtgttttttttattttggttttagtttgtgttttgttataaaattttttttagttgaatttggtttagttttagagtaatttgttatttttggggtgtttagttggtatgtaaatatttttggttatagttttatttttgagtgtgtttggttatttttggaaattgttggtatttaggtttaagtttgttaaattttagtgtttgtaggggttgagattgttggttgtttttggatgttttgggttgttatggaaatttttttaattttggttttttttgatttttgttttttgtggtaggttttttttttattttattgttttttgtttgttgagtttgagaatgttttatttgttttttggaattatttatgttttagtaatttttataagttggtggttgtttttgggtttaaatttttaaggtttttattgggtattgagtatatttggttatttttagaaatgttttgtggttttggggattagttttagttgtgttagtgtggttgtagagagtgtttggttatttttgaaagtgtttgggtgtttttaagtttagttgagtttagttttggattttttgttgatttgattgtatttggttatttttggaaatgtttggttgttttgggggtattttttagtttattagttttgtgggattatgtttggttatttttggaaatatttgggtgtttttttattttaggttttgttttggttttggtttatttgtttggtttgaatgtgtttgggtatttttgttgggggtgggttaggttgtttggaattgtggtggtggtggaggtggggattttgtggttgtggtgatggtggttgtggtggagttatggggtgggtttggtttggtgtgatggtggttgtggtggtggtggtggttgtgattaggtgagttttgattggtttttgtggtgggggtggttgggagtgtgtttaaatgtggggtgtttgggggtagtgttgggttttggtggaagttagaatgtaagtgttaggttgtgttgggttttgtgggaattgggggggttgtaggtaagggggggttttgggtttggttttgtagtggtgtagtttttttgggatggttggggtagaatggggagagattttttgtgtttaagatattggattggagttgaggttttaaatgaagggaggttttgtttggaatggggttttgaatagtattgaggggtgtttaggtattgtgtggggtagaatggggtgtgggagggttgggggttgaatttatttttggttttttagttgggtggttgggtttatgtagatttaagtgtgtgtttgtgtgagtgtttaggttttgtttttatttgtggagtttttagttttgtttgttttgttttttttgttttttggatttggggagtgttgtttttggggtgtgtatattggggtgtgggggtgggttggtaggtagatttaggtggttttttgggtatttttttttggggttttagtttttttatttgtagaatgagggtaatagaggtttaggaatgggtaaattgggtatttgagaatgtggtgtttttttgttttgtttggatattttttggggttttttgtgattgaaggatgtttagagtttttatttgatatttgggttttttggtggatagtatttatttttatagttattttgaatttttgataagtaatttaatttattgttaaggttttgtatgtgttgttttgtttgtttgttgtgtttttttatttgttgtgatgatttattttttagaatagtatgtttattttttgattttagttttgtttattatagggtgtttgaatttgtagggttaggttgggaatgtgtgtttatttttgtttttttaggttgggatttttggggaataattaatgttttgttgttggtagtttttttttttttttagttgtagtatttttatttttttttggttttttgtttttgtttggggttaaggttttttttaagtatttttttatttgtattttgtgtttattttgggttttaggttggagttatttgttagtttatttattttttttttgtagagattggaggtttatttgtttggatttattttgaggtttttgtttgtgtagaggtttttttttggattttgttttttattttttagtttagttggtttgatttttttatggagtttttaaagtatttggagtggtttttattgtgttttttttgttttaggtatttggttatttggttgttgtttttttatgtttaattgggttaagttggtagatttaggtgtaagttttggtttttttttggtttattgtatggttttagatatttttttgttttgagttttagtttttttatttgtaataggggtgatgaaaagtttgtttattggttgggtgtggtggtttatatttgtaattttaatattttggaaggtagaggtaggaggattgttttagtttaggagtttgtgattaatttgggtaatatagtaagattttatttttattggaaaaaaaaaaaaaaaggttgggtaaggtggtttatgtttgtaattttagtattttgggaggttaaggtgagtagattatttgaggttaggagtttaagattagtttggttaatatggtgaaattttgtttttattaaaaatataaaaattagttgggtgtggtggtttgttatttgggaggttgaggtaggagaattgtttgaatttgggagataggttgtagtgagttgagattatattattgtattttagtttgggtgatagagtaagattttattttaaaaaaaaaaaaaaaaaaaattgatttattgagtatgtagtatatttggggtaggtttttgggaattttatttttagtagttttaagggaaggttgttagtatatttattttatagatagagaagttgaggttttgagagggattggttttaaggttatttagtgatttagggaattttaaattaggatttgggtttatttttgtgttgggggtgagaggagttggtttggttaatgttgttttatttttgtttttttaggttggtgtttttagttggttgagtatggtggtagtttgtatttttggtttttttgtttggtgtagttagtagagttgttagttttgggtgtttatggttttttgtgtgagggtgtgagtggtttgttttagttttatttgttgatggaggatttaatggtttagtgatttgatattatattattaatttttttttattagttgatgaatggtggatttagtgatgagtggtttttgtaagggttatggaataatttgaagtgaggtatgagtggtttttgtggttgtttgtgattgttggagatagaggttttagtattttaagttaatttagtggatttttttagttttgttttaattaatggggttagtggggttttaagtagttatttaattatttagattttattttatttatgtggttatggtgggttttgagggtttttagtattgtgttttgtatttgttttgttgggagtggttggaggatttggagttgttgtttggtgatgtgttggtagtgagttgggtggttttgtaggtgttgggtgtggttgagggtggtgagtgttgtttatagag

SEQ ID NO: 735 - DNA, 6229 bp, Artificial Sequence
  chemically treated genomic DNA (Homo sapiens)
ttttgtgggtagtgtttgttatttttggttatgtttagtgtttgtaaggttgtttggtttattattagtatgttgttgggtagtagttttaggttttttggttgtttttggtggaatgggtatagagtgtggtattggaagtttttagggtttgttatggttgtgtgagtggggtggggtttggatggttaggtggttgtttggagttttattggttttattggttgaagtagggttgggagggtttgttgggttggtttggggtgttgggatttttatttttagtagttataggtgattataggggttgtttatgttttgttttaaattattttatgatttttataagggttatttgttattgggtttattatttgttagttggtgggagggagttggtggtgtggtgttaggttattgggttattgagttttttattagtaggtgaggttggggtaggttgtttatgtttttatatggagggttatgggtgtttaaggttggtggttttgttggttgtattagataagggagttaagggtgtaggttgttattatgtttggttagttgaggatgttgatttagggagatagggatagggtagtgttagttaggttaattttttttatttttaatatggagatgggtttaaattttgatttggaattttttgaattattgggtgattttggggttggttttttttagggttttagtttttttatttgtaaaatgggtatattgatagtttttttttggagttgttgggagtagagtttttaagaatttgttttaggtatattatatgtttagtaaattagttttttttttttttttttttgagatagagttttgttttgttatttaggttggagtgtagtggtgtgattttagtttattgtaatttgttttttaggtttaagtaatttttttgttttagttttttgagtagtaggttattatatttagttaatttttgtatttttagtagagatgaggttttattatgttggttaggttggttttgaatttttgattttaagtgatttgtttgttttggttttttaaagtgttgggattataggtatgagttattttgtttagtttttttttttttttttttaatagaggtggggttttgttatgttgtttaggttggttgtaaatttttgggttgaagtagtttttttgtttttgttttttaaagtgttgggattataggtgtgagttattgtgtttggttagtaaataggttttttattatttttgttatagatggggaaattgaggtttagagtagggaggtatttagggttgtgtagtaggttaggaggaagttaggatttatatttagatttgttgatttggtttagttggatatgagggggtagtagttaggtggttagatatttagggtagggaggatgtaatggaggttattttgggtgttttgggagttttatagaggggttaggttagttgaattaagaggtagggaataaagtttaggaagaggtttttatataagtaaaggttttgaggtgagtttaagtaaatggatttttagtttttgtagaggaggagtgagtgggttggtaggtagttttagtttggggtttagagtaggtataaaatgtagatggggaggtgtttagaaggaattttagttttaggtagggatagggagttaggagaaggtgggggtattgtagttgaggaggaggggaggttgttggtagtagggtattgattattttttaggagttttagtttggggaggtggagataggtatatatttttagtttagttttgtgggtttagatgttttgtgatggatagggttagggttgggggatggatgtgttgttttagagaatggattattatagtggataggaaggtgtgataggtagatggaatggtatatgtaaagttttggtagtgggttaagttgtttgttaaggatttagggtggttataaggataggtgttatttattaagaggtttgagtgttaggtggaggttttgagtattttttagttatggggaattttaagaggtgtttgagtagggtggaggggtgttatatttttgggtgtttaatttatttatttttaggtttttgttatttttattttataggtggggaaattgaggttttgagaggggatgtttagaaaattgtttggatttgtttgttagtttgtttttatgttttggtgtgtgtgttttgggagtagtgttttttgaatttgggaggtgggaggggtggggtaggtagggttgggggttttgtgggtgaaggtagggtttgagtgtttatatagatgtgtatttgggtttgtgtggatttggttatttggttaggggattggaagtgggtttgatttttggtttttttgtattttattttgttttgtataatgtttgggtgttttttggtattatttgaagttttattttaggtagggtttttttttatttggggttttggttttagtttggtattttggatgtggggagtttttttttattttgttttgattgttttaaggaggttgtattgttgtggagttgagtttgaggtttttttttgtttgtggtttttttagtttttgtggggtttgatgtagtttggtgtttgtgttttggtttttattggggtttggtattgtttttgggtgttttgtatttaagtatatttttagttgtttttgttatgagggttagttaggatttatttggttgtggttgttattgttgttgtagttgttgttatattaagttaagtttgttttgtggttttattgtggttattgttgttgtagttgtgggatttttgtttttgttgttgttatggttttgagtggtttggtttgtttttggtggaaatgtttgagtgtatttgagttgggtggatgaattgaggttgaggtggagtttgaggtaagggggtatttgagtgtttttggaagtagttgaatgtaattttgtgggattggtggattagagggtgtttttgagatagttgagtgtttttagaggtagttgagtgtaattgggttggtgagggatttgagattgggtttggttgggtttagagatgtttgagtgtttttggaaatggttgaatattttttatggttgtattggtataattgaggttgatttttaagattgtggagtgtttttggaaataattgaatgtgtttagtgtttaatggaggttttgggagtttagatttagaggtgattgttagtttatgggaattattgaagtatagatggttttaggggataaatgaggtgtttttaagtttagtaaatagggggtagtagagtggggaaagggtttgttgtaaaaagtagaagttggagaaagttagggttgaaggagtttttatggtaatttagagtgtttggaaatagttaatgattttgatttttatgggtattagaatttagtggatttgagtttagatgttgatggtttttggaaatagttgaatgtatttggagatggggttgtagttaagagtgtttgtatgttggttgagtgttttggaagtaatggattgttttagggttgggttgggtttggttagagggagttttatggtagagtgtaagttaagattaggatagaaaggatgtgatgattgtttattttgttattattttttgagatggagttttgtttttgttgtttaggttggagtgtaatggtgttattttggtttgttgtaatttttattttttgagtttaagtgatttttttgttttagttttttgagtagttgggattataggtatgtgttattatgtttggttaattttgtatttttagtagagatggggtttttttatgttggttagggtggtttggaatttttgattttaggagatttgtttgttttggttttttaaagtgttgggattataggtgtgagttattgtgttttgttgtttatttattttattaatatagtttagggtgtttaggaggttgaggttgtaatgtgttgtgattgtgttattgtattttaatttgggttatagagtgagattttgttttaaaaatataaaaataaaaaatatagtttagggtttagatgtttggaggaagtttttaaaggtagggttatgatggagtatttgtagggagagggtagtaggaggttggtattagtgatggtattaggaagaattttaatagtgaattgttatgtagtttttaaaatttatttgtaatgattttgagttatgggtttattttattttgtttttttttttatttttttttttttttttttttagttttttataaatttagatgttggagtttatttttgtaaatatgggtttttatttattgttagttttaggatggaaggagggggtgaattatgtatagttttggtttattttttaatattaggtagtgttggataggggatttagaaagggaagtagagtgggttgttgatgtttggaaagtttttttattagagtgtttagtgggttatatagtattatgggggatgagttggggttggagttggttgtatttgatattagattttttatttaagtttttttgatgataatgtttataatagggtttggttgatgttttgttttgttatgatttttgttgggtgattgtgggataggtttttgttttttgttggggttttagttgttttgtttgtaaaatggaggtgatgatattatttttagtttttttaaggttggttgagggagaagttatgtaaaagtgtttggtatatagtaggtgtttaataaatagttaatgggattagttttgtaaatataaggaaattgaggtatagagtgggaaagttatttttttagagttatatagtgaagttgaaatttaaatttgagttttgattgggttttttggtttgaattttattttagagaggttttgatatatggagggaatttttaataggtgttttagatatattatggttaagggtttattttgttgggttttaaatatatggtattttgtttagggtagattggataaggttaggttaaggtagagtttgaggggaggggatattgagtgtttttggaagtagttggatgtaattttgtaggattggtatattggagtgtgttttgagatagttgagtatttttggaggttgttttggtagttttaggtgaggtttgtatttttttttattagtgtttatttggggagtggatgatttttttgtttagatttggtgaatatttatttatttattaaagttttagtttttatattttttttttaggttgaagttagtaggattggaggtagattttatatatagagtaggtattgtttgggtatggtagttatgatggtgggaagtggtttttagaatttagtttattgttgggattatattgttttgtgggtgagaggaattgtttatggatattttaggttgtagttgaattgggttggtataggtgattaggtgattttaattttatttttttaaatgggtaggtgtggggaggggaatgagattaggtaatataaaatatttaaaaagtatagaaaaattggaaaatataaatatagatgatttgtttaaagtgtattttttttagtttagagggtagggtttgtaaatagagttttaggtgtttggggtaagatttggtagttgtttttagggggtggtttagtatggttattgtttataaaaagtaataaattaggttgggtttagtggtttatgtttgtaattttagtattttgggaggtaaaggtaggtaaattatgaggttaggagtttgagattagtttgattaatatggtgaaattttgtttgtattaaaaatataaaaaattagttgggtatagtggtgggtgtttgtaattttagttatttgggaagttgaggtaggataattgtttgaatttgggaggtggaggttgtagtgagttgagattatgttgttgtattttagtttgggtaatagagtgagattttgttttaaaaaaaaaaaaaaaaaaagaaaaaaaaagtaataaattagttgtagggatttgttgttatttataaagttatttttgttttttatttttgttttatttagttttgattgatattagaatataagtgatgtttttattttttagtaaggattgagatggttttttgttttttgggtgttaggttggtggtttagtt

SEQ ID NO: 736 - DNA, 6148 bp, Artificial Sequence
  chemically treated genomic DNA (Homo sapiens)
aaagatattggggttaattttagtaaggaaaataaaaagatttttaagtattatttttttgtaaatttttaagtattatttttttggtaaattttttaagttaagataatgtattggtaaaaggaaaataattatagtttggatatatattttgtatataattgtgtattaagttataaattttggaaaattagtaatttagtaataagttgttattttaattataaaatatttttatgttttagataattatttttggaatgtttgtatttgtttatatatattttgtaagtgatatttaagttttgaagattaatttttattttttatattatttttattagatttttttatttttgtttttttaagtaaatatataatttaaattaatgagttttatttatttgttagttttaattattgataaaatttagtggttgtttagtgatgtatagttttattaaaagatatatatgattatgttttattaaatatggaatatatgtttaaattgttgagataattgttaatgtattaattataaaaagttattattttttattttagttttaattaaaattaaagtgtgaatattttattatggttagaaattatttaatatagatgtataggttttattgttgattttttatttggaaattttattaattgtaaattattaggtttttaattaaaatgttatattggtgaaatgagttggttttatttttataataatattattttgatggaagaaatgtgagtattttagttttgatttgtgggtaagtattttttttgtttttagaatataaatagtaaatattggtattggaaaaatttggttttaatgagattttttatttttaggttaattgtagatttttgggaaattttaaataagggatggtgattttgttttggtgttagggttaatatagtaattagttaggttttaattttgggttttgaagggttttattggtattatggttgatgtggattgatgtgttggaggaggtggataaggaagaggttggtttgtttatttgtagttagagttgttgttgttgttagtagtgatagtattattggattagttaaatttagtattttttgtatatttttatttttagtatataatttttaagtggattaaaattttattattattaaaaatatagataagtatgttatttattttttatatatatatttttttttttattttattagtgttgtttttttttgtgtgttagtggtggggaagggtgggggaaggaaggagattttggggatgtttgtgtatttttgtttttattttattttatgtgtagatagttttagtgttagggtgtgtggtagatggttttttttttttaatttaaatatattgatattggtgttttatgtgttatataattttgttgttgtttttggtttaggtgggtgttttttttttatgttgtgtggtttgggtggggaggggtgaggggaaggagtgagagttgtgtagatagtaggtgttgggttggggtagtttagatatagatggtattgttaggttgggaatattttttttttggtttgttgtgtattgttgttttttagttttttttggaaagtggggggtgttggtgttaattgtgttgggtattttttggtttttatatttatatttgaagtttttggtgatttagtttttgtttatgtttttggtgtggtgataatttagaagtttttgttttattttattttgttgttattttttgtttgagggaggtagggagggtggattggggtttggggtttggagggagtggaggttaggtggggagggggttagagttgggggtggtggttgttatttgtaatggtggtggtggtggtggtggttttgtagttgtttgggtggtggtggaggatggagttgggggggggtggggggaggagagggggtgatttgggggttttttttttttttttttttttttttgttttttttttattttatagagtttttggttttttggagtttggtgtggttggtgggagggtaagtgaagggttgtaggggagggagggagggagttggttgggttgggttgtggagttggagtgggaggtggtggtggtggtggtggtggtgggagggggagggaggagagagggtggtggtggggagaggaggaggtggagattttatatgggaattggatattggttataaatttattattagaaaatattgtttgggtgggggttgggttatgttggtggggtggtggttttgggttttggggtgtgtttggtgtggggaggggttttgtggtttttttttgggttgtgttttgttgaggggattttttgttgtttttttgttttttttttttttttgtttggggttgttgttgattggtttttgttgttgttgtggggtttgttgttgattttgaggaaaatttttgatgttaggggttggtttttggtgattggtgggagtggtttttttgtgtttttggttttgtttgttgtttttgtttttttttttgtttggtttttgtttttaggtttttttgtgtttttaaattagtggtgttttgtgttttttttttttttgtgagaatatttttttagttagttagagttgggagtgggggtagttgtttttgggtgggaagttttgggttttttttttgtttgtgtggtttttggtgggtatttgaggtttgggagtggaggttttttgtttagttgtttttttggtgtatttgtttatttgttttggttgtggatgtgtgtgttgttaggttttgggtgttttttttagtttgttgtggttttttggggagatgggtttggtgtgagggtttgtatttggaagtttatgaagtgggtggtgtttaatgaggtagggattggagagtgtggagtagtttagaagttgattttattttttgtattttggggaagagggaatttgggttagtttgtagtaagaattatttttgattattttaggagattatggtagattaaaaatatttttttgaatagttttttgtattgtttgttgtaagtatttgtttatatatggtatatagattgtgggtggattgtaatttatttttgaaattatattttttttagggatatttgtttttaatgattttgggaaagttatgaggtattatatttattatgaagagattgtttttttattttgaagttagtgatttttgagattgtattggggataatttttttgtataatgattatattttattatgtagtgtattttagaaaattataaaagtttataagttttattgtttttggaaatatttgggtagtatttttattattttgttatgtggttttagttttgttgatgtatttgttatttttttttattgtaatatttttgttaatgtttgtggtttttttttgtagaagagtttttttttttgatatgtattttattttttgtttttttatgttttgataatttttttatggtagttatttttttatattgtagttttttggtatttatgtattgtgtggtattaatatttatatttttaggtttatattttttatgaattgtgtatttgttgggattgtggataggagtaggaaattaaataaaagggttttttaaaaaagttagttttttttgtttgtaagggaaatttgtttttttgattattttggagtaaaatttgttattttaagataatatagtttgtttgagagaaagttttgtattatgttttttttttttttttatattttttagtatgttatgagttgatgaataaatagattttgttttatttttgttgtatttataaaatatatataatgtatttttataattattagattttttatagttattattggtaaaattattgggttataggttttttgttgtaaaatataaaaataggttatatttttattttatagtattttaatttgttttttatttttaagaaaatagttttttatgatattagtattaaaaagagtgtttgaaattttaaatatttaatttttgagagttagagtatttggaattattgaattattagatattttttattagtgagatgtttatttgtttttaaatttaatattaatatatttataagaattgaatgtgttttatgagttatattattttaaaatattttttttagtttggttagattgtattaaattttaggtggattaaattttaaaatttagtatgtgagaatggattatatatttttggttttatgtatttgaagaattataagtttttatttttgtttaatttttgtttgtggattatagtagttttataagtttttataataaaagtatgtttgattttgttattgaattattattgattagggatattatttatttaaataatgttgtttttttttttagattatgttggtatgaatttggtagaatttgttgattgtggtatgttggtattttatatagagtgtgtggtagattttttttttattttgttattatatttagtaatatggagtgtagttagtatgtttatttttgggaatgttttttttaaattttgtaaagaaagtttttattttttattatattaaatatttttaagattaatattttttagtattagttatttatttattttaagaaaaatgtttatttttttttattattaatgattaagtttgatattgagttattttttggtattttttttattttttgggagtaattaaaattggaaggatatttagaattttagagtatttaatgttttagtttatttaggttgttataataaaatattattaattaggtagtttataaagaatagaaatttatttttaatagttttggaggttgggaagtttaagattatggtattagtagatttggtgtttaaagagggttttgttttttggtttgtaggtggtgattttttgttgtgtttttatattttagaaagagtgagggaatttttttggatttttttttttttttttttgtttttttttttttttttttttttttttttttttttttttttagagatagtgttttattttgttatttagattggagtgtagtggtatgattatagtttattgtagtttggaatttttaggtttaggtaatttttttgttttagttttttgagtagttgagattattagtatgagttaatgtttttagttattttgagttttttttataagggtattaattttatttttgagggtttaaatttttatgatttaattattttttaaaggttttatttattaatatattttggaagttaggattttaatttatgaatttggggaaatataaaaatttagattagggtattatataataaaaattaagttattgtttttttgttttaatagaaagggtgtgttattttaggagagggtatggaataaagtagatatagaatatttgtttgtggaagaaatatatgttttaatgttttaatgatggttttaataaatttgtgtattatgtatagtttatatagtattttttttttgggatgtaatgtgatttattggaaagaatataaaagtgttttggagatttgtagattagagtttaaattttttttttgtagagtttgttttattttaggtaagttatttaatttttttaagttttatatttttttatttgtgaaatggtagttataattattttaataatttatgtgaattaaattttatgaaatattagtatttaaaatatagtgagtggttagtaagttaagatttttttattataaatgtgaatatatttatgttaaattaataatagttgttataaataaatataaaaatttatattggtattttttgttatagttggttttgaaataattatgttaagtttatagttgtaattagtgaatatattttagatgattaatagaataatttttaaaggagtatagtttaaatttttgttggttaagttttttaatttgtgatattttttttatagtattttaaattgattaaggtatatagtttattataatagttattagtattaattgtttttttttttttttttttgatgtttgtttgtttgtttgtttgttttttt

SEQ ID NO: 737 - DNA, 6148 bp, Artificial Sequence
  chemically treated genomic DNA (Homo sapiens)
agaaaaatagatagatagatagatagatattagggaaagggagaaaaagataattagtattgataattattgtaatgaattgtgtgttttagttagtttgggatgttgtaagaaaaatattatagattgggaggtttaattaatagaaatttaagttatatttttttagaaattgttttattaattatttagaatatatttattaattatagttgtagatttaatgtggttattttagaattaattgtggtagagagtgttaatatagatttttgtatttgtttgtagtagttattgttagtttaatataaatatatttatatttatggtaaaggaattttagtttgttgattatttattgtgttttagatattaatattttataaaatttaatttatataagttgttgaagtagttgtaattgttattttataaataaggaaatataaggtttagaaaaattaagtaatttgtttgagatgagataaattttgtagagagaggatttgaattttggtttgtaagtttttaaagtatttttatgttttttttaataaattatgttatattttaagaggaaaatattatataaattgtatatagtatatagatttattagagttgttattagaatattagaatatgtattttttttataaataggtattttgtgtttgttttgttttatgtttttttttaggatgatatattttttttattaagatagaagagtagtaatttaatttttgttatgtgatgttttggtttgaatttttgtgtttttttaaatttatagattgaaattttaatttttaaagtgtgttagtagatggggtttttgggaggtgattaagttatgagggtttgagtttttaagaatgggattagtgtttttataaaagaggtttaagatggttgggaatattaatttatgttggtagttttagttatttaggaggttgaggtaggagggttgtttgagtttaggagttttaggttatagtgagttatgattatgttattgtattttagtttgggtgatagaatgagatattgtttttaaaaaaaaaaaaaaaaaaaaaaaaaaaaaaaaaaaaaaaaataaagaaaaagaaaaagaggtttaagagagtttttttattttttttaaaatgtgaagatatagtaagaagttattatttataaattaggaaatggaattttttttagatattaaatttgttggtgttatgattttggattttttagtttttagaattgttagaaataaatttttgttttttataagttatttagttgatggtattttgttatagtagtttgaatggattaagatattagatgttttgaaattttaaatatttttttagttttagttatttttaagaaatgggggaagtattaagaaatagtttagtattaaatttagttattggtagtaaagaagaatgaatattttttttaaaatgaataaataattaatattgagaaatgttaattttaagaatatttggtgtaataaagaatgaaggttttttttgtaaaatttaggagggatatttttagggatgaatatgttggttgtattttatattattggatgtgataataaaatagagaagaaatttgttatatattttgtatggagtattgatatattataattggtagattttattaaatttatattggtatagtttaagagaaagaataatgttatttaaataaataatatttttaattaatagtaatttaataataaaattaaatatgtttttattatggaaatttatgaaattattatagtttataagtaaaaattgaatagaaataaaaatttataattttttaaatatatgaagttgagagtatataatttatttttatatattgaattttagggtttaatttatttaagatttaatgtaatttgattagattgggagaaatattttgaggtagtatggtttataagatatatttagtttttgtaaatatattgatgttaaatttgggaataaatgaatattttattgataagagatatttagtaatttagtaattttggatattttgatttttaaaagttaagtatttaaagttttagatattttttttagtgttggtgttataagggattatttttttaaaaataaaaagtaagttggggtattatggaataaaaatatgatttatttttgtgttttatagtaagaaatttgtaatttaataattttattaatagtgattgtgagaggtttgataattatgggaatatattatgtatattttatagatataatgaaaataggataaagtttgtttatttattagtttatagtatgttgggaaatatgggaaaaggggaaaggtatggtgtaggatttttttttagatggattgtgttattttaaaatggtaaattttgttttagggtggttagggagataagttttttttataaatggagaaaattgatttttttaaaaaatttttttatttggttttttatttttgtttataattttaatagatgtatagtttataaaagatgtgaatttggaagtataaatattaatattatatagtatataaatattagggggttatagtataagaaaatgattattataagagagttgttaagatatagaaaagtagagaatgaagtgtatgttaggaggaggaatttttttgtagaaagaagttatagatattaataaaaatgttgtagtgggagaaagtaataggtatattaataaggttagagttatgtggtgggataatagggatgttgtttaggtgtttttagaagtgataaaatttgtaaatttttataattttttgaagtgtgttgtatggtaaaatatggttattgtgtaaaaaagttgtttttaatgtagttttaggagttattgattttaaaataaagaaatggtttttttgtagtaaatgtagtattttgtggtttttttaaagttattgaaaatgaatatttttaaaaagggtgtgattttaagagtgaattatgatttgtttgtaatttgtgtattgtgtgtggatgaatgtttgtagtgagtggtgtggaaggttgtttagagaggtgtttttggtttgttgtggttttttgggatagttaggaatgatttttgttatgggttgatttgggtttttttttttttgaggtgtagggggtggggttggtttttggattgttttgtgttttttggtttttattttattgggtattgtttattttgtgggtttttaggtgtgagtttttgtgttgggtttatttttttaaggggttgtggtggattggaggagatgtttggggtttggtggtgtgtgtgtttgtggttagggtgggtgggtggatgtgttgaggaagtggttgggtgaggagtttttgtttttgggttttgggtgtttgttaagggttatgtgggtgagggggaaatttagaattttttgtttgggagtgattgtttttgtttttggttttggttggttagggggatgtttttgtgagaggagagggggtgtggggtattgttggtttgggggtgtggggaagtttgaggatgagggttgggtagggaggggagtagaggtggtgggtagggttggggatgtggggaagttgtttttgttagttgttgagagttagtttttgatgttaggagttttttttaaagttaataataagttttgtggtgatggtgagaattgattggtggtggttttgagtgggaggaaggagggggtggggaggtggtggggggtttttttagtgaggtgtagtttgggaggaggttgtagaatttttttttgtgttgggtgtgttttggggtttagagttgttgttttgttggtgtgatttggtttttgtttgagtggtgttttttggtgatgaatttgtagttgatatttgatttttatgtagagtttttgtttttttttttttttgttgttgttttttttttttttttttttttttgttgttgttgttgttgttgttgttttttgttttagttttgtggtttggtttggttggtttttttttttttttttttgtagttttttgtttgtttttttgttggttgtattgggttttaggaggttagaggttttgtggggtggggggaggataggaggggaggaggagggaggggggatttttgagttgtttttttttttttttttgtttttttttggttttattttttgttgttgtttgagtagttgtggggttgttattgttgttgttgttgttgtaggtaatagttattgtttttaattttagttttttttttgtttggtttttattttttttgggttttgggttttggtttgttttttttgttttttttaggtgggggatggtggtggggtggggtgaggtgggggtttttgggttgttattgtgttgggggtgtgggtgggggttgggttattggaggttttgggtgtgggtgtggaggttgggggatgtttagtgtggttgatattgatattttttgttttttggggaaagttggggggtggtggtgtgtagtgggttgggggaggggtgtttttggtttagtggtattgtttgtgtttgggttgttttggtttggtgtttgttgtttgtgtaatttttgttttttttttttgtttttttttgtttgggttgtgtggtgtggggagggggtgtttgtttggattgggggtggtggtgaggttatataatgtgtggagtgttggtgttagtgtgtttgggttggggggagggagttgtttgttgtgtgttttggtgttgaggttgtttgtgtgtggggtggggtgaaggtgaggatgtataggtgtttttggggttttttttttttttttatttttttttgttattggtgtgtaggaaaagatggtattggtggggtgggggggggggtgtgtgtgtgggaggtgggtaatgtgtttgtttgtgtttttaatagtagtggggttttgatttgtttgggagttgtgtgttaagaatagaaatgtgtggaagatgttgggtttggttgatttagtgatgttgttgttgttggtggtggtggtagttttggttgtaagtaaatagattagttttttttttgtttattttttttggtgtattggtttgtattagttatgatgttggtggggttttttagagtttaaagttgaagtttagttggttgttgtgttgattttgatgttgaggtggggttattattttttgtttgggattttttgggaatttatagttagtttagagataaagaattttgttggggttaggtttttttaatattggtatttattgtttatgttttgaaagtagaggaaatgtttatttataagttaaagttgggatgtttatattttttttattaaaataatgttgttatgaaaataaaattaatttattttattaatgtggtattttggttgaaagtttggtagtttgtaattgatgaagtttttaaatagaaagttaatagtgaaatttatgtatttatattgggtaatttttagttataataaagtgtttatattttgattttagttgaggttaaagtaaaaaataatggttttttgtagttaatatattggtagttgttttaatagtttagatatgtgttttgtatttggtaaagtatggttatatatgttttttagtagaattatatattattaggtaattattgggttttgttagtggttgaagttgataaatgagtgaaatttattggtttaggttatgtatttatttaggaaaatgaaggtggaagagtttaataaagatggtgtaggaaatgaagattagtttttagaatttgagtattatttgtaaaatatgtataaatgaatataaatattttgggggtggttgtttaaaatatgaaaatattttataattaaaatagtaatttattattaagttattagttttttaaggtttatgatttaatgtataattatatgtaagatatatatttggattgtaattgttttttttttgttagtatattattttgatttggaaagtttattaaggagatagtatttgaaagtttatagggagatggtatttgaagatttttttgttttttttattagggttgattttaatattttt

SEQ ID NO: 738 - DNA, 6186 bp, Artificial Sequence
  chemically treated genomic DNA (Homo sapiens)
tttatttgttttggttatttaaagtgttgggattataggtatgagttattgtatttagttaaattgttagttttttaaagtagttaagttaatttatatattttttaatagagtgtgttttttttagttaatttatgtttttgtttgtatttgtaatttttagtttttgtttttagttattttggtgggtgtatgatggtattttattggggttttatttgtatttttttgatgattaatgaagttgagtatgtttttatgtgtttgtttaataaatatttgttgaaaggatgaataaagagtgaatgaataaaatatggaaagaaatttaattttgttttgtgttttgtttaaaatttattagtggtttttattgttttttttttggttgatgggtatttgtttgttttggttttttttgattttatttgttttggatggattttttttgttttttttttgggtttttgttatttaggttgtttttagttttttttaaggattttttttgttttataattttgttataaattgtttttttttgtttagaatataatttaggtttaaggaatttagatgtgttttttgtattttagtttgaaagtttttttttttaggaagttttttttgatttttattttttagtaagggtggtataaattgttaatttaggtttatttttgtttattttttttgtttgtgtttttgagatggagttatattttgttgtttaggttggagtgtagtggggttattttagtttattgtaatttttattttttgggtttaagtgatttttttgttttagttttttgaatagttgggattataggtatttattattatgtttagttaatttttgtatttttatatttatttatttatttatttgagatagagtattgttttgttgtttaggttggagtgtagtggtatgattttggtttattgtaatttttgttttttaggtttaagtgatttttttgttttagttttttgagtagttgagtttgtaggtgtttgttattatatttagttaatttttgtatttttagtagagatggggttttattattggttagattggttttgaatttttgattttaagtgatttgtttgttttggttttttaaagtgttgggattataggtgtgagttattatgtttggttattattttttttttttagttgtgattatagttgtatatatttttttttttttggtttttttttttgtttttttttttttgagataggattttgttgtgttatttaggttgtagtgtagtggtgtaattatagtttattgtagttttgaatttttgggttaaatgagttttttattttggttttttaaagtattgagattatatgtgtgagttattatttttggtttgtaaatatttttttaaaaatataatatttgattaatatttgttattttattataagaaatatttaaaaaaattttaatttaaaaaaattttaattttttaagttatataagagtagtaattttattttgtttttagtaagatatttggtatatagtaaatgtttaataaatatttgttgatagtataaaggttaagtaatagtataattggtattattatatgaaagtaattattttttagaaatttatttatttttgggggatttgggttaataaaaaaattatagaaaataattttatttatttttttttttttttttttttttgttaggttttttgattggggggaggttttaaatgtatatattgtttttgttttatttggtgtagttgttgtgtgtatgtgttatggaaatttatattaggtaggagattaaggaggagaggagaaaagaaaggtattgttggtattatagtgaaatttatattttgtggttttgttttagtttttttgtttttatttgtttgtttatgaaatagtttaaaattaatatggtgtaatggatggtattatagattttttatttttttggttagattttttgggtttaaagtttggtttaattatttattatttaaataatttttgataatgtattttgtttttttgggttttagtggttttatttgtaaaatggggataatattattttttattttatggggttgtgaggattgtataagttaatttgtgtaaattgttaagaatatagttttaggaagttttgttattgtgaatgtatattaattttttttattattattttttgagatagagttttgttttgttgtttaggttggagtgtagtggtgtgatttaagtttattttaatttttgttttttaggtttaagtgatttttttgttttagttttttaagtagttgggattataggtgtttgttattatgtttggttaatttttgtgtttttagtagagatagggttttgttatgttggttaggttggttttgaatttttgattttatgtgattggtttgttttggttttttaaagtgtttgattataagtatgagttattatgtttggtttatgattattatgtttttaggttttagtttttttatttttgaggtgaggattaataatttggttatttttaagtgatgtttaaagaggttgagaagaagtaaaggtgttttgtatataggtgaggttaatagttgttagtgatggagattggtgttgtttgggttattagtgttttggaattaggttgtttatgggtttgaattttatttttatttttattttttattaattgtgtgattttgggtaagttattttgtttttttgaattttagtttttttatttgtaaaaggtaggtgaataatagtatttatttttttttgtgtgatttagttttggagttagtggattgggtttaaattttagttttgtaagtgattagttaggtgattttgggtagagggaattatttaatttttttgtatttgggtttttttttttatgaatgtggagattttataggatgaaatgagggtatagttaaggtgtttggtatattttaggtaggtagggggttttgtttatgttatttttttttggtgatggatattgtttttaaatagtatttgaaaagtggttgtagggtgtgtggttttaaagattttaggtgtttttggaaggtgagttaatgttttttaggtttgtttgtgagtgggtgggtttaagttttggaggatttggggtgggggtggtgtggggtttaggtttggggtgttgagaggtggttggtttggttgtttatgttgagatgtgtgaggtgagtgggtgttggggtggggtggggtggggtggggttgttgtatttttgtgatgtgtgggttaattaggtggtgttgtggttttggttttggttttttgtgttgttgttgttgttgttgttagtgttagtgttagtagttgggtttgattatttgttgtttggtgtttgttgttgtttgtgttagtaattgggtttgattatttgttgtttggtgtttgttgttgtttgtgttattggtatggtgttttggggtttttgtagtgttgatggttttgatttgttttgggtatgtgttgggggttgtgtgaggttggtgggatggagggaggttggtggggagggaaagtattgggtttgtagttgtttggggtattttgttttttgttttgttgttggttttgggggtttgggatttttatgttgtttgtggtttagttttttttgggggtgtaaggtatgggggaaatttgggtgatttagtttttgtggagtagagtgtggggggttgtgtgtttagttttggggttttggagggttgggttgggttagagttgttgtgaggaggtttttttgttttggggtttttgtttgtaaaaataattttttagggaaggggatgttagagatggggggtgggaagaggggtgtttttttgtttttgtttttttattttttttgtggttagggttttttttttttatgaaaaatattttgtgattaatggggtgagttggggaggggtttagattgtagaaagggatttttattgtttttttaaagttgttgtataagttatattatttttttgtggttatttagttttgttttttttgttttttttatttagatattgtgggggaagtttgggggaattagggaagaagggggatgtttatttttgatgtgttttatttgatttttggtttggggtagatttggggtgtagttgaggatgtttaggattttggtagttgtggttttgtttttttttttttgtaatatgtggagtttttttttggggatgttttttagatttaattttggtaagtttttttttgtaatgtggtttgtggagtttgattgggtgtttggagtttatttgttgtggtttaagttttagttttttgggttttagtttttttgtaatgtgatttgtttttttgttttaggaaggtaggtatttttgttttgtgttgttttgattgttggtgaatgtagtaggtaaatttggatatgattgtttttttttttttttttgtttaggaattaggagaaatagttttggtttttaggagttggtgattagtttttaaaaatatttttttgttttgttttgttggtttttttttgagggttgtatttggagtgttgaaaagttattttttagggttttattggagggtttggttttgtttgtttgttttttttagtagggtattattgtgtttaataatttattatattttgatatattttttattttaagttagtggggttggagagtaattttaggggtggaaatagaatatagattttgttttgagggtttgggggtgattggagtttttttgtagatggattttttttagtaggggaaaatttgtggtttttttgttgttaggtgtagtaatagtaagattattttttgtaaagatttatatggtgatttgggtttgtgttgttgtgaattttagaatatttttttgtttatttttttttgaattgaggagggggtaaaatagggtgaatatttatgaggttttgtattaggatgtattttattgatggtaattggtagttgatggttaatgagtatgtttggggtgtgttttgtttattttaagaaatttatttatgaagtttagttgtaatattttttaaaatttttatttttttttttttttttatttttttttttgttaaggattttttgttatagaaattgttaggtggttgggttttgtttgggggtaattgtagttgatttttgtttttggtaggtattttatttttgtgtttgattttgtgtatttttgttgtttggattttaagatttgttggaggtgttttggaattagaatttgagaggaggtaattggggtttgagtgggaaaattgaaatataattaattgaaagttagaaagtaggtagttgttgttttttttttttttttttttttttttttttttttttgagatagagttttgttttgttatttaggttggagtgtagtggtatgattttagtttattgtaatttttgtttttttggtttaagtggtttttttaatttagttttttaagtatttgggattataggtgtgtgttattatgtttagttaatttttgtattttttatagagatagatttgtattatattgtttaggttggttttttatttttgggtttaagtgatttttttgttttggtttttaaaagtgttgagattataggtatgggtttttgtgtttggttgtttttgtgttttttaaggtagtgtgtttgaggttaggagtgattggttttttaggtagttagataattgtgtgattttgagtaagttattttttttttgtgtgttttattttttttatttttaaaattggataggagttaaaaatgtggtagtttttttgggttgttgtgaagggttaatgagttaattttgtaagtggtttagtttgtgttttgtatggagataaataatggttagtattaaatattattttttttaaagatgaagttgtgtgttttaagttttttgttttttttttggattttttttttttttagttggtggagatgggattgggttgtgaaaaggtagtgaggtatttgtgtttggtttttgttgtgattaaggttatgtgtttagaagttaaggttagtgggttttgggtgattttgttagagttttgt

SEQ ID NO: 739 - DNA, 6186 bp, Artificial Sequence
  chemically treated genomic DNA (Homo sapiens)
ataaagttttgatagagttatttgaggtttattgattttgatttttaagtatatgattttggttataataggagttaggtatgggtgttttattgtttttttatagtttaattttatttttattagttgaagaaaaggggaatttaaaggaagaataaggagtttaaaatatataattttatttttggaaaaaataatatttaatattaattattgtttatttttgtgtagggtataagttgagttatttataagattaatttattgattttttgtaataatttaagaaggttgttatatttttggtttttgtttaattttagagatgaggaaagtgaggtatatagagggaaagtggtttgtttaaggttatatagttatttgattgtttgggaggttagttgtttttggttttggatatgttattttgaaaaatataaaaatagttgggtatagaggtttatgtttgtaattttaatatttttggaggttaaggtaggaggattgtttgagtttaggagtaggagattagtttgggtaatatagtgtgaatttgtttttataaaaaatataaaaattagttgggtgtggtggtatatgtttatagttttaggtatttgggaggttgagttaggaggattatttgagttggggaggtagagattgtagtaagttgagattgtgttattgtattttagtttgggtgatagagtaagattttgttttaaaaaagaaaaagaaaaaaaaaagaaaagaaaaaagtaataattatttattttttagtttttagttaattatattttaatttttttatttaggttttagttgtttttttttaaattttggttttaaggtatttttaataagttttggaatttagatagtagaaatatgtaaggttaaatatggggatggggtatttattagaggtagagattagttataattatttttaagtaaaatttaattatttggtaatttttgtggtagaaagtttttaatgaaggaaaaaataaaaagaaaaaagaaaataaaaattttaaaaaatattataattggattttgtgaatgagttttttaagataaataaagtgtattttaaatatatttattagttattaattattaattgttattaataaaatatgttttgatataaaattttatggatgtttattttgttttgttttttttttaatttagaagaaaataaataagagaatattttggaatttatagtaatataaatttagattattatgtgaatttttgtaaaaaataattttgttgttattatatttggtaataaggaagttataggtttttttttgttaaagaaagtttatttgtaaagaggttttaattatttttagatttttaaggtaaagtttgtgttttatttttatttttggggttattttttaattttattggtttaaaatgggagatatattaaagtgtggtaggttattaaatataatgatattttattaaaaaaaataaataaataaaattaaattttttaatggggttttggaggatgattttttaatattttaaatgtaatttttgaggaaaggttggtaaaataggataagaaagtatttttggaagttgattattagtttttaagaattaaggttgttttttttgatttttaaataaaagaggagagagaaatagttgtgtttagatttgtttattgtgtttattaataattaagatagtatgagatagaagtgtttgtttttttggaataaagaggtaaattgtattatggagaagttgaagtttaaaagattggggtttaaattatagtaagtggattttagatatttagttaggttttgtaggttatgttatagaagaaaatttgttggggttaaatttaaggggtatttttagagaggagttttatgtgttgtagggaagggagggtaggattatagttattagggttttgggtgtttttagttgtattttaagtttgttttgagttgagggttaggtagggtatattaagggtggatatttttttttttttttggtttttttaaattttttttgtagtatttaagtagaaagaataaaaaaaataaagttaggtaattatagaagagtaatgtggtttgtatgataattttggggagataatgaaagtttttttttataatttaagtttttttttagtttattttgttggttatggagtattttttgtgaaaaggggggattttaattataaaaaagatgggaaaatagaagtagagagatatttttttttttgttttttatttttagtgtttttttttttggaaggttgtttttatagatgggaattttaaaataggaaggtttttttatggtggttttgatttgatttgattttttaaaattttagggttgggtatgtggttttttatgttttgttttgtaggaattgagttatttaagttttttttatgttttgtatttttgaaaggggttgggttgtgggtgatgtgagggttttgggtttttgaggttggtagtagagtggggagtggggtgttttgggtggttgtgggtttggtgttttttttttttgttggtttttttttgttttgttggttttatgtggtttttggtatgtatttagagtgggttggagttattggtgttgtagaagttttggagtgttatgttggtggtgtgggtggtggtgggtattgggtggtgggtgattgggtttggttgttggtgtgggtggtggtgggtattgggtggtgggtgattgggtttggttgttggtgttagtgttggtggtggtggtggtggtggtgtagggagttggggttggggttgtaatgttgtttggttggtttgtgtgttatggggatgtggtggttttgttttattttgttttgttttggtgtttgtttattttgtgtgttttggtgtgggtagttggattagttattttttggtgttttgggtttggattttgtgttatttttattttagattttttaaggtttaggtttatttgtttgtggatgggtttggggagtgttggtttgttttttggaagtgtttgggatttttggggttatatattttgtgattattttttaaatgttgtttaaggatagtatttgttattaggggaaaataatgtgaatggagttttttatttgtttggagtgtattgggtgttttaattgtgtttttattttattttgtaaagtttttatgtttatgaaggaagaaatttaggtgtagagaggttgagtgattttttttgtttagggttatttggttaattatttgtagggttgggatttgaatttggtttgttgattttaaagttgagttatatagaaggaggtgaatattgttatttatttattttttatagatggggaaattgaggtttagaaaggtgaagtgatttgtttgaggttatatagttaataaggagtgaaagtggaagtgagatttaaatttgtgagtagtttgattttggagtattgatgatttagatggtgttagtttttattattaatagttgttgattttatttgtgtgtagagtgtttttgtttttttttaatttttttaagtattatttagaaataattaggttattgatttttattttagaggtaaggaaattgaagtttggagatatgataattgtaggttaggtatggtggtttgtgtttgtaattaagtattttgggaagttgaggtgggttgattatataaggttaggagtttaagattagtttagttaatatagtaaaattttgtttttattaaaaatataaaaattagttgggtatggtggtgggtatttgtagttttagttatttgagaagttgaaataggagaattatttgaatttgggaggtggaggttgaaatgagtttagattatattattgtattttagtttgggtaatagagtaagattttgttttaaaaaataataataaaaaaaattaatatgtatttatagtgataaggttttttaaggttgtgtttttagtaatttatataaattaatttgtgtaatttttataattttatgaggtaagaagtagtattatttttattttgtagatgaggttattaaggtttagaaagatagagtatattgttagggattatttagatggtaagtgattaagttaaattttgaatttaagaagtttggttagggaggtgggaagtttataatattatttattgtgttatattagttttgaattgttttataggtagataggtagagatagaggagttagggtgaggttgtagagtgtaaattttattgtgatattagtgatgttttttttttttttttttttttttaattttttgtttgatgtgggtttttataatatatgtatataatagttgtattaaataaaatagaaatagtgtgtgtatttgagatttttttttaattaaaggatttagtgagggaaggaggaaggaggaaggtagataggattgttttttgtgatttttttattggtttgggttttttaagggtgaatgagtttttaagggataattatttttatgtaataatgttagttatgttgttgtttgatttttatattgttaataaatatttattgagtatttattatatgttagatgttttgttaggaataagataaaattgttatttttatatagtttaaaggattggaatttttttggattgggatttttttaagtgttttttatggtaagatggtagatgttaattaaatattatatttttgaaagggtatttataggttagaagtagtgatttatgtatgtaattttagtgttttgggaggttgaggtgggaggtttatttggtttaggagtttaaggttatagtgagttatgattgtattgttgtattgtagtttgggtaatatagtgagattttgttttaggaaaaaaaaaataaaaaaaaaagttagggaaggggagatatgtataattatggttatagttagaaaaaaaaagtggtggttgggtatggtggtttatgtttgtaattttagtattttgggaggttaaggtaggtagattatttaaggttaggagtttgagattagtttgattgatggtaaaattttatttttattaaaaatataaaaattagttgggtgtggtggtaggtatttgtaggtttagttatttgggaggttgaggtaggagaattatttgaatttgggaggtggaggttgtagtaagttaagattatgttattgtattttagtttgggtgataaagtaatattttattttaaataaataaataaataaatgtaaaaatataaaaattagttggatatggtggtgggtgtttgtaattttagttatttaggaagttaaggtaggagaattatttgaatttaggagatggaggttgtagtgagttgagatggttttattgtattttagtttggatgataaagtgtgattttattttaaaaatataaataaaaaaagtgggtaaaagtgggtttaagttagtaatttatattatttttgttggggggtggaagttagagaaggttttttggaggaagaggtttttaaattgagatataaggaatgtgtttgggttttttgggtttgggttgtgttttgggtagaagaaaatagtttatagtaaagttatgaagtagggagggtttttggaggaaattgaagatagtttggatggtaggaatttagagaagaagtaaaagaaatttatttggagtaggtggggttagaaggagttagggtaggtaggtatttgttggttaaaggaggggtagtgggaattattggtgggttttaggtagggtataagatagagttggatttttttttatgttttatttatttattttttatttatttttttaataaatatttattgagtaagtatatgaaaatatgtttaattttattagttattagggaaatgtaaataaaattttagtgaaatattattatatatttattagagtgattggaaataaagattgaaaattatgagtgtagataaagatgtggattaattggaaaaggtatgttttgttgggaggtatataaattggtttaattattttggaaaattaataatttggttgggtgtagtggtttatgtttgtaattttagtattttgggtggttgaggtaggtgga

SEQ ID NO: 740 - DNA, 6209 bp, Artificial Sequence
  chemically treated genomic DNA (Homo sapiens)
gtgtttgtaattttagttatttgggaggttgaggtaagagaatttttgaatttaggaggtggaggttgaagtgagttaagattatgttattgtattttagtttgggtaatagagtaagattttgttttaaaaagtaaaaataaaaataaaaataaatatatagaaggtatagtaaaaatatggtttgattattttatgttgttattgttgtgtaggtggtttgttattggttgagttattgttttgaggtggttgtatatataggtgtaaatatatatatgttttgtttttattgtttgtttttttggagaattataatatatttgtatttttgaaatttttatgtgttagttttttgggaatatggattttaagtgttttttagggtagaaagtagttattggagggtatagttgtgtgtggttggtgtggttggtatggtttttatttgtttagaagttgggtttttttttaggatttagagtttttggtggggatgagggatagagtttggagttaattagaatgtagagatttggttgtttttttaatttgttttttgtttttagggggattttttttattattttttgatttttttgattttgtagtgtttatttttttggttatgatgaggtttgagggtttgtgttggattttggtgattattttgttgttgtttgtgtttagttttgagatttttttgaagttattgtttttgagtttgttgattttggttttttgggtgagaaaggtttttagttgttttttttgttgtttgttaagttttagtttttttagttttttttgtaggtttattaggtttgttttgtagagattttttagggtaggggttagttatttagggagattttatttggttgtttgttatgtggttgtggtgtattggtttttaggaggatatagattggatttttgtatttgaggggtttatggtgtagaaggaaaggatttatgttgtgtatttttatagatatattaatgattagaatttagggtggttttttgggaattgaggatgttgttttgattttgttttaataagtttagtagattttaggattttaaggataagttgtagtttaaaggatttaggaagtttttgtttttttttttttttttttttttttttttgagatggagtttttttttgttgtttaggttggaatgtagtggtgtgattttggttttttgtaattttggttttttgggtttaagagatttttttgttttagttttttaagtagttgagattataggtttttgttattatgtttggttaatttttgtatttttagtagagatagggttttgttatgttggttaggttggtttttaatttttgatattgagtgatttgtttgttttagttttttaaagtgttgggattataggtgtgagttattgtatgtggttgggagattttttttttaatgtatgagttttggattatgttgggaggagatgaggaagttgggattgggtgaatggagtttgggttaagatgtttgtttttgtaggagatagaggaataagtgttttgagtagttttagagtatagaatgagaattaagagtagagggtagaaggtttagtataaaagttgtattaggtaggtatggtggtgtatgtttgtagttttagttatttgggaggttgagatatgagaattgtttgaatttgggagggggagattgtagtgaattgagattttgttattgtattttagtttgggtagtagagggaggttttgttttaaaataaaataaattaaaaaataaaaaaaataaaaaataagtatgattagtttgggtaataaagtgagatttatagttgagtatagtggtttatgtttgtagttttagttatttaggaggttgagtttaggaggttgagattgtagtgagttatgattgtgataatgtattttagtttgggtgatagagtaagattttgtttttatataataaaaaatttttaataatttaaataagtaagtatattgtattttattgggtgatttaaggaatttttagaggaaattttgatagtaagttatttttataaatgttttgatttagaattagattttggagtaatagataattaagtgtaatgtatataggaatttattgttgtgtataagtaatggaatgtaaattatgtgtataaattaaaattttttagtatttatgtttaaaaagaataggtgaatttattttatttatttagagatagggttttgttttattttttaagttggggtgtagtggtatgattatagtttattgtagtttttaatttttgtttttaagtgatttttttattttagtttttttagtagttaggattataggtgtgagttattatgtttggttttttttaattaattaatttttattattattattattttttgagataaagttttattttgttgtttaggttggagtatagtggtgtgattttggtttattgtaatttttattttatgggtttaagtaatttttttgttttagtttttgaagtagttggaattataagtatttgttattatgtttagttaatttttgtatttttagtagagataaggttttgttatgttggttaggttgtttttgaatttttgggtttaagttatttgtttattttggttttttaaagtgttgggattatagatataagttattgtatttggttgaaattaattttaataatatatttgatttaatttattaaaaatgttattatttttaatgtataattagtatgaaaaatgaatgaatgttttatattgtttttgttttaagtttttgaaatttataatggtattattgtgtttatgtttttgtgggtttgggtaatttttgttttatgtgttgtttgtagttaggggttatttaattaggtagtgtagttttaaatggttttttggaagaataggttatttttagaggttttaatttaggaaggagttaaagttaaggtggatagttagagaggggattgaagtagggaatgaaggtgtggattgttttttttatttggaaatttttaattttaaagtttgattattgtttgtttatagttggaagtggtgtaagttatggggtatataggttagaattgaggtgatggtgttggagttggtgttgtaaagagtttgttggaaggtaggggtttgggtattgttttttgggttggataaatattattttattttatttttattattgtttttggaggtttaggtaggagggaatagatttataggggtgggggaatttgtttgaggtaataatatttgtttgaggttaggataatttttgtttattttagtgttttttatgaggggaaatagggttttagtaggtgtttattgaggagttgttgaataaggatttagaagaagtagaaatggtgagattttgggagtgggatagaaggtaaggaggggaatatgaatgaatgaatgaataatattaatgaataaatgaatatttattttttttgagatagttttgttttgttgtttaggttggagtgtattggtatgattttagtttattgtaatttttgttttttgggtttaagtgatttttttgttttagttttttgagtagttgggattataggtgtgtattattgtgtttagttaatttttttggtatttttaatagagatggggttttgttatgttggttaggttggttttgaattttgggttttaagtaatttatttattttggttttttaaagggttgggattataggtgtgagttattatatttagttatgaatgaatatttttgatggtagatttggaaggttttaagtattgtttaaaatattgaaaatgtattttggagttagttgattaatttattttaaatttattggtaatttaattgtggttattaaataaaataaaataaaattttggtgtttttatagttagtttttttttttgggggaattttttaagagatgggaattaaattttatatggaagagaaatgtgaagggtgagttttgtgtagagaatgaggaatgggtttttgtgtttggttgtgtttgtgttgatttgtatatattggtattaagagtttttatttgggttatagaaggttgatttttaagtgggagaggttattagatatgttatagtttttgatatttggtttttgaggggttatattgtaggtatggtatttggattttagttaagggttttggggattgttttgttttgttttggtttgtagaatgggagtgtagagattattttggtatgattttattagtgtgtgtttttaatatttagtttttttttttgttttggagtagtgtgattttgttagtatgttatttggattttagtatattttttttttagatttttttatttaggtttttggttgttttttatttttttaaagtttttgtattgggttagttttttataagggttttttggtttatttattttagaatttgtatttttgtttttaggggttagtagggttttttgatttttatgtttttttgttttttatattttggtttttttgtttttttatatttttagttttagggattttatatattgggtattgttataagtaggagatgtttttttagagatgtttattttgatattttgatttttttgggattttattttgatttttttagaattttaatatgagatttttaggattttttgttttgtttttttagaatttttataatatgattttttgaggattttttaatttgatttttttagaattttttaatatgatttttgaggatttaatttgattttttttataatatgaattttttggaatttttgttttgattttattagattttttttagtagaaatttttttatttggaatttgttagaatttttattttgattttgttaaagtttttttatgttttgatatttttaagatatttttttgtttttagatattttagaatttttattttgatttttttaaagttttttgattttgatttttttagggttttttattttattgtgattttttaggatattttttttttatattttgatttttttgggagttttttgtttttttttttttttttttttttttggttgtttatggatttttttattttatttttttttttaagggatttttttgttttattttggtattttaggtgttttttttattttatgttaattttattatttagggatttattttttaaaaggattgttttttgtttttttaagattttttagtttgttttttttatttaggtgttgtatttttaatttgtggtttaggtatttttttattttattttttttttataggaatttttttattttattttttttttatagggatttttttattttattttttttttatagggatttttttattttattttttttttatagggatttttttattttattttttttttatagggatttttttattttattttttttttatagggatttttttattttattttttttttatagggatttttttattttattttttttttatagggatttttttattttattttttttttataggaatttttttattttattttttttttatagggatttttttattttattttttttttaagggatttgttttattattattttaatatgtagaatattttttgtttattttttttttataggtttttattgatatattttttttttttagggatttttttaattttattttataatttaggggttttgtattttattttttttttgtaaggatatttttttggtttgattttatgatttagggattttaaattttatttttttttaaagggatttttttttattttaattttattatttagggattttattatttttttgattttattatttagggattgtttattttattttattatttagagatttattattattttgttatttagtgattttatgttttgtttttttttatagggattttttttggttttattttattattgagggatttttattttgtttttttttattagggattttattttattttagttttattatttagggattttttattttatttttttttttttggagtttttttgtttagattttttttttaggggttgtttgatttttttata

SEQ ID NO: 741 - DNA, 6209 bp, Artificial Sequence
  chemically treated genomic DNA (Homo sapiens)
tgtggggaggttaggtagtttttgaggaggaaatttgggtaagggggttttagaggggagaggatggggtgaggggtttttgagtaatgagattgagatggggtagggtttttggtaggaaaagatggggtaagggttttttaataatgagatagggttaagggaggtttttgtgggaaaagatagggtatggagttattgagtagtagaatggtggtaggtttttgagtagtgaaatggggtgaatggtttttgaatagtgaaattggggagatggtggggtttttgagtaatgagattggagtgaggggagatttttttgggaaaagatggggtttggaatttttaagttgtgagattaggttaaggagatgtttttgtagagagaagatggggtgtagggtttttgaattgtgagatggggttgagggggtttttgggaggagaggatgtgttggtgggggtttgtgggggaaggataggtaaggggtgttttgtatattgaaatgatagtgaagtgagttttttgggggagagatggggtgagggggtttttatgggggaaagatggggtgggagggtttttatgggggagagatggggtgagggggtttttatgggggagagatggggtgggagggtttttatgggggagagatggggtgagggggtttttatgggggagagatggggtgagggggtttttgtgggggagagatggggtgggagggtttttatgggggagagatggggtgggagggtttttatgggggagagatggggtgggagggtttttatgggggagagatggggtgggagggtttttatgggggagagatggggtgggagggtgtttgagttataggttgagagtgtagtatttgggtggggaggataggttgagaggttttgggggggtggggagtggtttttttggggaatgagtttttgagtaatgaggttggtatgggatgaagagggtatttagggtgttaaggtggggtaggggggttttttaggggagaggatggggtgaggaggtttatagataattagggaaaagggaagagaggggaggatagggggtttttagaagggttaggatgtgggagaggggtgttttagggggttatgatggggtgggagattttagaaaggttaggattgggggattttgggggggttagggtgggagttttggggtatttgaggataagggggtgttttaggggtgttaggatatgggggggttttagtggggttaggatgggagttttagtgggttttagatggaggggtttttgttgggggaggtttagtgggattaggataggggttttagggggtttatgttgtggggggggttaggttgggtttttgggggttatgttgggggattttgggggggttaggttagggggtttttggggggttatgttgtgggggttttgggagggtagagtagggggttttaggggttttatgttggggttttgagggggttaggatggggttttagggaggttaagatgttaagatgggtatttttgagagggtattttttgtttgtggtggtgtttagtgtgtggagtttttgaagttggaagtgtgaggagatagggaagttagagtgtgaggaatgaggaggtgtggggattaggggattttgttggtttttgaaagtagaggtgtagattttgaagtgagtggattggaaaatttttgtgaggggttgatttagtgtagaagttttgaggaggtggagggtgattagaggtttgggtgaagggatttgagaaaggggtatgttggggtttgggtggtgtgttggtagaattgtattgttttaggatgagggaggggattgggtgttgggggtatatattggtggggttatgttagggtgatttttgtatttttgttttgtaggttgaggtagggtagggtgatttttggggtttttggttggggtttgggtgttgtgtttgtggtgtgattttttaagaattaggtgttagggattgtggtatgtttggtggttttttttgtttgggggttggttttttgtgatttagatgaagatttttgatgttaatgtgtgtaagttaatatgggtatagttagatatggggatttgttttttattttttgtatagaatttgttttttatattttttttttgtgtggggtttgatttttattttttgaaggatttttttaggagaggaagttggttgtagggatgttaaggttttgttttgttttgtttaataattatagttgggttgttagtaaatttaagatggattagttagttgattttagaatgtatttttaatgttttgagtagtatttgagattttttaagtttgttattagaagtgtttatttatggttgggtgtggtggtttatgtttgtaattttagttttttgggaggttaaggtgggtggattatttgaggtttagagtttaagattaatttggttaatatggtaaaattttgtttttattaaaaatgttaaaaaaattagttgagtgtggtgatgtatatttgtaattttagttatttaggaggttgaggtaggagaattgtttggatttaggaggtagaggttgtagtgagttgagattgtgttagtgtattttagtttgggtgatagagtaagattgttttaaaaaaaataaatatttatttatttattgatgttatttatttatttatttatgtttttttttttattttttgttttatttttagggttttgttatttttgttttttttgggtttttgtttagtagttttttagtgagtatttattagggttttgtttttttttatgggggatattaagatgagtaggggttgttttgattttaggtaggtgttgttattttgggtaggtttttttatttttgtgagtttgtttttttttgtttgggtttttggggatgatggtgagaatggaatgagatggtgtttgtttagtttaggaagtggtgtttaggtttttgttttttagtgagttttttgtagtattagttttagtgttattgttttggttttggtttgtgtgttttgtggtttatgttatttttagttgtaggtgaatagtggttgaattttgggattggaaatttttagatggaaggagtagtttatgtttttattttttgttttagttttttttttggttgtttattttggttttagtttttttttgaattgggatttttggaggtggtttgtttttttagagagttatttaaagttgtattgtttggttgagtagtttttggttataggtaatatataaaataagaattgtttaaatttatgagagtataggtgtaataatgttattgtagattttaaaggtttaagatggaaatagtgtgaaatatttatttattttttatattggttgtatgttgaaaatgataatatttttgatgggttaaattaaatgtgttattaaaattaattttagttaggtgtagtggtttatgtttgtaattttagtattttgggaggttaaggtgggtaggtggtttgaatttaggaatttaagagtagtttgattaatatggtgaaattttgtttttattaaaaatataaaaattagttgggtgtggtggtgggtgtttgtaattttagttattttggaggttgaggtaggagaattgtttgaatttgtgaggtggaggttgtagtgagttaagattatattattgtattttagtttgggtgatagaatgagattttgttttagaaaataataataataataaaaattaattaattaaaaagagttagatatgatggtttatatttgtgattttagttattaggaaggttgaggtgggaggattatttgaggataggagttggaggttgtagtgagttgtaattgtgttgttgtattttagtttgggaggtagagtaggattttgtttttaaataaatgaagtgagtttatttgttttttttaaatatgggtattagaagattttaatttgtgtgtatggtttatattttattgtttgtgtatagtaatgggtttttgtgtgtattgtgtttagttgtttgttattttaggatttggttttgagttaaggtatttgtgaaaatagtttattgttgaaattttttttgaagattttttgaattatttaataaagtgtaatgtatttgtttgtttaaattgttagaaattttttattgtgtagaaataaggttttgttttgttatttaggttggagtatattgttatgattatggtttattgtagttttgattttttgggtttagttttttgagtaattagaattataggtatgagttattgtgtttggttataggttttattttgttgtttaggttggttatgtttattttttgttttttttgttttttggtttgttttgttttgagatagagtttttttttgttgtttaggttggagtgtagtggtaagattttagtttattgtaattttttttttttgggtttaagtagtttttgtgttttagttttttaagtagttgggattgtaaatgtgtattattgtgtttatttgatgtagtttttgtgttgagttttttgttttttatttttggtttttattttgtgttttgaggttgtttagaatgtttgtttttttattttttgtaaagatagatattttggtttgggttttgtttatttgattttagtttttttgtttttttttgatatggtttggagtttgtgtgttaggaaggaggttttttggttgtgtgtaatggtttatgtttataattttagtattttgagaggttgaggtaggtggattatttaatgttaggagttggagattagtttgattaatatggtgaaattttgtttttattgaaaatataaaaattagttgggtatggtggtgggagtttgtaattttagttatttgggaggttgaggtaggagaattttttgaatttgggaggttaaggttgtagggagttgagattgtgttattgtattttagtttgagtaatagagggagattttgttttaaaaaaaaaagaaaaagaaaagaaaaagatggaggttttttgggttttttgagttgtagtttatttttgaggttttgaggtttgttagatttgttgagataggattaaggtagtgtttttagtttttggggagttgttttggattttggttattggtgtgtttatgggggtatatagtatggattttttttttttatattatgaattttttaagtgtaggaatttagtttgtgtttttttgggggttgatgtattatggttatatagtaaatggttagatggagtttttttaggtagttaatttttattttggggggtttttgtagggtaaatttggtggatttgtagaagaagttggaggagttggaatttgatgagtagtagaagaagtggttggaagttttttttatttagaaagttaaggttggtgaatttaaagatgatgattttgaaaggattttagagttgggtgtgggtaatggtggggtggttattaaagtttagtatagatttttgggttttattatggttaggaaggtgagtattgtggggttggggaggttggggagtggtggggaaggtttttttggaaataggaggtaggttgggaaggtagttgggtttttgtattttgattagttttaggttttgttttttatttttattagggattttaggttttgagaaagggtttagtttttgggtagatgggagttgtgttagttatattagttatatatagttgtgttttttagtgattattttttgttttggagggtatttgaaatttatatttttagaaagttagtatgtgggggttttagaaatgtgagtgtgttatggttttttagagaaataagtgatgaagatgaagtgtgtgtgtgtttgtgtttatgtgtatagttattttagggtgatggtttagttagtgatagattgtttatgtagtggtggtgatgtaagatgattaggttatgtttttgttgtgttttttgtatgtttatttttatttttatttttattttttgagatggggttttgttttgttgtttaggttggagtgtagtggtatgattttggtttattttaatttttgttttttgggtttaaggatttttttgttttagttttttgagtagttgggattataggtat

SEQ ID NO: 742 - DNA, 6224 bp, Artificial Sequence
  chemically treated genomic DNA (Homo sapiens)
ggttgaagtgtagtggtataattttggtttattgtaatttttgttttttgggtttaagtaatttttttgttttagttttttaagtagttgggattataggtatgtgttattatgtttagttaatttttgtatttttagtggaatgaggttttattatgttggttaggttggttttaattttttgattttatggtttatttgttttagttttttaaagtgttgggattataggtgtgagttattgtgtttggttataaattgaaatttttatgtttaatgttatgatatttaatattgtgtttaattaaaatgtttatgtatgtagtttgagatttttgtatagaaggtgtttagggttatgatttgggaagattaatttgttattagtggaggggtggataaaaattaatgtttattgggattaagatgagtagtttttgtgttagaaattttatttttttaatttttatagttttgtgaggtaggtgaaattatttttattttatggatgaggaaattgaagtttaattggtttaataatatgttaaaggttatttaattgatgaatagtggagttgagatgtggaagattgaagatttatagtttggatttttaattaaatattatatggttttgttatagaagaaagttagaaagtttttaaaaataaaatgtagagttaagtgttattttggatataagggattgggggatgggaagaggtaagaatttttaggtttttttttggttgttaatagttagtgggttttggtagtgggagttgggttattagaggtggtgtttgaagtggggtaggtataaaatgggtttttgggtaagtatttgtttaggtgatggttaaagttatagaaaaaaggtgttttgatggagtggtggttgagtgtggggagagatgagtaggggattaagtttggagtttgggtagtttatgattggatattaggagaagaaaagaagttagtggaggagatattgaggttagggatggggagggtattgtggaaggttgggttttatttggtgttttggggagttggtaggggggtatattaaggagtttaagttgttttattagtaaatgtttttgtttttgattaggggtaatgaaataaagggatttggttgagtaattggtttttggtttttgttagtttaggaagttagtatttattttgttttatattttatgtgttatttttagtttttgaagtaaaattagttgagattagtatttgttagatttgaatgtgtagttttaagttttggggggtgggggtgggggtgagttaaggaggtttggtttttttagggtaagggtaggaaggatagtagggaggtttattttgagtttggtaggtagtttttttttttttttttttttagtaaagaaaggtagataaaaatgtgtttttataaatagttttagttttagttgatttgtaaatttagtgggttttttgtgttaatgatattatttttttttttatggtaatttttgatgatattaaaattgttaagtaatgttggagtagtttggtgttttaaatgagtaggttgatgtttgaggatttaatggagaaattttaaagtgagttggggtgtgtggtggaggaggggtgtgttgtagttggggttgttgggttttgatgggtgggagtggggtggagtggttttgtttgttaggtagttttgggtgtggggtttggtggttatattttggagatagttatggtttaggtaggtgggggagggtgttgtttttgttttgatgtgttaggagttgttagtagttatttaggtgattaagttggtttattagtattgagttattgtttgttttgagttgtttttgttttttttttgtatttgattattttgggagttggaaatttggagttgtatttgagttttgttttttttagtttttttttttttattttgggttttaggaagatgggatttgttgtgagtttgttgttattttttaaagatatggaagatgttgtgggggttagaagtgtttggggggttgtggtagtaggtagagtgtaatagtagatatggtggttaggttgtttgtgtgtgttttttggaggtgttgggatagaagggtagttttgtttgagttgattggagtttttttgggttggttttgaatttattttttatggggatgttttggtaaaggagtggtttttggggttggagtggtatttggagagtgaggttggattggtttaggttggtttgggtaggtaggtggttttgtgttgggtgtggatttatgtgtgtgtgagtgtgagagtgtgtaagttagtgtgtgtgttgtttttttgttggggatagtagttgggtttagtagagagttggttgggggtttgataggagtttattttaattgatgttgggtgggtgtaggttttgagatgggtgttagggagaggggatgttagatatatggtttgagtagggtgaggagtagttgttagttttggtaggtttaggttttgtttgggtgtataggatagagatatagtaagatgtttaggtaggaagttgtttggaggggttggttagggtgagagtttattattggggggttggatagtttattagttgtttttttattttggtaggtttgggtattaaggaaatagttttttattaagaattatgttatttttttatgtagggttagttagtatttatgtgtgtttttgttgagtttatagggatatatttagtgagaagggtgttggttagggtatggtttttttatgattaggatttagtgggtgttatttttaagtttttggtttttatagggtatgttttagtgtgtgttaggaggaggggggaggtttttttttttttatatagttggtagttttgtgggtattagtgagtaagttgttagagggagggaggttgtgtgtttatagtggtaggataatattaattaggagtttttaagagaagaggttgggtgagaaaagtattgaggttttttttttttttttttttttttttttttttttattttgtttgaagggagtgttgttttttgggttagagataagtattagtttgtagtggagaatgtaggattttgttgtttagaaggagtagttatggtaaggtttttattgttgttgtgtgttttggatttttgggttagggatgggggtgttaaggtgtttaggttgttttttatttgggatagggaggttaattttatagttgtgggtttttgggttaaggggttttattttttatttggtttgttattttttttttagattgattgtgaaatagtttaattttagttggtttttggttttttagttagagggagaggtgtttgtttttattttttttgttttagttgggttaagttagtgttattgggatatttttatttaaggttttttttattttattatttttgggatattttttttgtgtatttattttataaatatttagggagtattgttgggttttaggttttaagttatattttttggttgggtttgatttggtatagattttgattttgaaatttagtattagggtaggtttagggagttgtttggttaagtatggttattttttataggttttggtttttttatttttgttgtagggtggatgatttggttagttttggggatattgggtttagtgagtttgggtttataaagtattgggttttattgggaagtaaggttaatgttttgtggtttttagttattttttttttggtattgtatattaagaggtttgtgttgttttgtttggggtttttttgaggttggttttggtgggaattgggttgtaggaggagaggatgagtttaggagttgtgtggtttttaggtttggtgggtttgggatttagttttatgggagtttatttagttggggttgaggtttttggggtaagtaaggagttttttttgtaggtaggtttttttggtggttgttttggtttaggtttggaggtggtatttgggagttttagtgatagagtgtttggttagggaagggttggtattagaggtaagtttttttgggagtagttgatttggatggaagttttgtgtatttgagagggggagtgtggggattgtatggtttttttagtgttttgaggataaattgatgttttgtgagtgttttgggtttttttggatttgttagatatagggagggtgtagtgggtggggtttttagttaaggaaagtttgttttgtgtataatttttaaggatgattaaaaagttttttgttttggaggagtatatgtgtttagagttaggaggaatttataagtgttttttatgttagtgaatttttatatttggtttttggatgaggagaatgatttagttgtgggggtattttatgttgttttataaaaggtgattttgtgtttaggagttttttatgtatgtagagttgagtaggggttgttgtttagttggggttagaggggtggaggttgttgagtattaggtagatagtaggttagtagtgggtagtaggttgggttaggagggagtagagagtaggggttagggtaggttgagtaggaaaggaaaaggttgtttggggttttgagggtttagggaggattttagatagttggtttttttatgttagtttgtttttgtgggagaggttttttgtgtaggtgattgggtagggaagaggttaagatattgaaagattgaattttttatttaaatggtttagagatgtttattgtatatagtgttttgggtgtagaaggtaggaaggatttatgggaggttgttttgtggattgaagtagaaagttttttttgtaagatgtgtttgttgttttgagtaggaaggtttaggttgtggaagtagtgtttgagatttgagtagtaggaaggatattagtaaagtttattaggaggtatttggttgtttgtatttattgggttttaaggagagagtttatttttgggagtttttttggtagaaagaggtggattagttagtaggttggggaggagtattgtaaatggaagtttttgagggtagaatgagttttgaatttgttgaagttaaggttggtttttttgtttagggtgagtagtttgtttgggtttgggaagttgtttttttttgaggaggtgttttttattttattagagtttagttttaggggttaggaagggttaaagtgagaagagtgagatgtgagataaaggggattgtgtttttttttgggagggtgtggggtttaggtagtattttgttttggtgtataggttgttaagtagatgatagttatggtttgattattaggtgtaagtattggtggtaggaagagggggtggataaagtaggatagagtttttgttttggggatgtttatagttttgtagtagagtagtggaaaggaaagttgagttgagtgtggggttaattgtgttagaaataagtggagttataaagttattattagtttttaggtggttttgtttttttgttaattttgggtttaatttattgttgaagttggtagttatgatttatttagtttagataatttataaatttatattaatattgggtaatggtttttaatatagaattttataaagatggataaaaaagataagttgagaatgataaataaaggaagaagtagtttttatttgtagttgtaggaggaggtgaaggtttggggagatagattagggtgggaagaggtaggatggtggttggttaatatgaagttagtagtatgagttttaggtttggtgttgtttttttttggtgatttgggtaagttattttatgtttttgggttttaatttttttttttgtttaatagagataattatagtatttatgagttagggttgttgagaggattaaataagataataagtgaatgttttgaatggtatgattggtatatatgtatatgtttagtaagagataattattattattgtgatgataattggtgttagaggaataaagtgttaggagagattatattttgtttgggggaattaggaaaggttttatggaggaggtgattttgaaagaatttttttttgaggagaaataaaagtttttagaatgtttaggaaagttgggaagaaataataatgttaggtttattttttttttaaatagtatattgtttgtttattga

SEQ ID NO: 743 - DNA, 6224 bp, Artificial Sequence
  chemically treated genomic DNA (Homo sapiens)
ttagtggataaataatatgttatttgggaaaaaaatagatttggtattattgtttttttttagtttttttgggtattttgagagtttttgtttttttttagaggagggtttttttaaagttattttttttgtgaagttttttttgatttttttgaataaggtatggttttttttggtattttgtttttttgatattagttattattatggtgataatagttattttttgttgaatatgtatgtatgtgttagttatgttatttagagtatttatttattattttatttaatttttttaataattttaatttataggtattataattatttttgttggataggagaggaaattgagatttagagatatgaagtaatttgtttgagttattaggaagaggtagtattgggtttgaggtttatgttgttgattttatgttaattaattattattttgtttttttttgttttggtttatttttttgagtttttatttttttttgtaattgtagatagaagttgtttttttttttgtttgttatttttaatttattttttttgtttatttttataaagttttatgttaagaattgttgtttagtattggtgtaaatttataaattatttgggttggatgggttatggttgttaattttagtgatgagttggatttagagttggtaaaaggatgaagttatttgggggttgatggtggttttgtggttttgtttgtttttggtgtggttggttttatgtttagtttagtttttttttttattgttttgttgtagggttatgagtatttttagggtaagagttttgttttgttttgtttattttttttttttgttattagtgtttgtatttagtagttaggttatggttgttatttgtttggtagtttgtgtgttagaataaggtgttgtttggattttatatttttttaggaagagatatggttttttttattttatattttattttttttgttttagttttttttggtttttagggttgagttttggtggggtggagggtatttttttagaaggggataattttttaggtttaggtagattgtttgttttgggtaggagggttagttttggttttagtaagtttagaatttattttgtttttagaagtttttatttgtaatgtttttttttaatttgttggttagtttatttttttttattaaggaggtttttagaaataagttttttttttgaggtttggtaggtgtaggtggttagatgttttttgatgagttttattggtgttttttttgttgtttaggttttaggtattgtttttgtagtttgggtttttttgtttagggtgatgagtgtattttatgggaaggattttttgttttagtttataggatagttttttatgagttttttttgttttttgtatttaggatattgtgtgtggtgggtatttttgggttatttgggtgaggaatttaattttttagtgttttagttttttttttgtttagttatttatgtagagggttttttttatagaagtgggttggtataagaaggttagttgtttggagttttttttgagtttttaggattttaggtagttttttttttttttgtttagtttgttttggtttttattttttgtttttttttggtttaatttgttgtttgttgttggtttgttgtttatttagtgtttgatagtttttgtttttttgattttaattgggtagtagtttttgtttagttttgtatgtatggaagatttttaggtatagagttattttttgtgaggtagtatgagatatttttatagttgggttattttttttatttaggagttaggtgtgggaatttattggtatgagagatatttatgggttttttttgattttgagtatatgtgtttttttagggtaggggattttttggttatttttaggagttgtgtatagagtgggttttttttggttggagattttatttattgtattttttttgtgtttggtaagtttgggagggtttagagtatttataaagtattagtttgtttttggggtattggagaggttgtgtagtttttatatttttttttttaggtgtatagagtttttatttaaattagttgtttttagaagggtttgtttttggtgttgatttttttttgattaggtgttttgttattagggtttttaggtgttatttttaagtttgggttaggataattgttagggaagtttgtttgtagaggggattttttgtttgttttaaaggttttaattttagttagatgagtttttgtggggttgagttttaggtttattaggtttgggggttatatggtttttaagtttattttttttttttgtagtttagtttttattagaattagttttaggaagattttaggtagaatggtataaattttttggtgtataatgttagggaaaggataattggagattataagatgttagttttgttttttggtggggtttagtgttttataaatttgagtttattgggtttgatgtttttaaagttgattaggttatttattttgtagtaggggtggggagattaaggtttgtgaggagtgattgtgtttggttaggtagttttttgaatttgttttgatgttgagttttagagttagaatttgtgttaggttaaatttagttaaagggtgtgatttggagtttgggatttagtagtgttttttaaatatttgtggaatgaatatataagggaaatgttttagaggtggtaaagtgagaggggttttggataggggtgttttggtggtattggtttggtttagttggggtaggaagagtagaaataagtatttttttttttagttagggagttagagattagttgggattggattgttttataattaatttggaaagaaggtggtaggttgggtggggagtggagttttttgatttaggaatttatagttgtggagttagtttttttgttttaggtgggaggtagtttggatattttggtatttttgtttttagtttaggaatttggagtatgtagtggtagtggggattttattgtggttgttttttttgggtagtggggttttgtgttttttattgtaggttggtgtttgtttttagtttaggaagtggtattttttttaggtaaaatagaaaaaaaaaaaaaaaaaaaaaggaaaagaaaattttagtgttttttttatttagtttttttttttgaaggtttttggttggtattgttttgttattgtgggtatatagtttttttttttttggtagtttatttattggtgtttgtaaagttgttagttgtgtgggggagaagggattttttttttttttttgatatatattggggtatgttttgtggggattaggggtttgagggtggtatttgttgggttttgattatggggaagttgtattttggttagtattttttttattgaatgtgtttttgtgagtttagtagagatgtatatgggtgttgattggttttgtataagagagtgatatggtttttggtaggaagttgtttttttggtatttaggtttgttagaatgaaggggtagttgatgggttgtttagttttttagtgatgggtttttattttggttagtttttttggatggttttttatttgggtattttgttgtgtttttgttttgtgtatttagatagggtttgggtttgttggggttggtagttgttttttattttgtttaggttgtgtgtttggtgttttttttttttgatgtttattttagggtttgtgtttatttagtattagttaggataaatttttgttaagtttttagttagttttttgttggatttagttgttgtttttagtagggggatggtatatatattggtttatatatttttgtatttatatatatgtgggtttatatttaatatagagttatttatttgtttaggttagtttaagttaatttagttttgttttttaaatgttattttgattttagaagttatttttttattgaaatatttttgtgggagatgagtttagagttagtttgggaggattttagttagtttggataagattgtttttttgttttaatatttttagaggatatatataggtagtttgattattatatttgttattgtattttgtttgttgttatagttttttgggtatttttggtttttatagtgttttttatatttttagggggtggtagtagatttatagtaagttttatttttttggagtttaaggtagggaggggagagttagaaggggtgggatttaggtgtagttttaagtttttagtttttaaaataattagatgtaaaggagaagtaagaatagtttgaggtgggtggtgatttagtgttagtgggttggtttagttatttggatggttgttggtggtttttggtatattaggatgggagtagtgtttttttttatttgtttggattgtggttgtttttagagtgtggttgttgagttttgtgtttagggttgtttggtaggtgaggttgttttattttgtttttgtttattagggtttagtggttttggttgtggtgtgttttttttttattgtgtgttttggtttattttgggatttttttattaaatttttaggtattgatttgtttgtttggggtgttgagttgttttaatgttgtttggtaattttgatattgttgggggttgttatggggaggaaggtgatgttattgatataaaaaatttattgaatttataaattagttggggttggagttatttataaaaatatgtttttatttgtttttttttgttgaaggggaggaggaggaagggttgtttgttgggtttagggtgagtttttttgttgttttttttatttttgttttagagaagttagatttttttggtttatttttatttttattttttagaatttggagttgtgtatttagatttggtaggtgttggttttagttggttttgttttgaaggttgagagtggtatatgggatgtaaggtagggtgggtgttggttttttgggttggtagggattagaaattagttatttaattgggtttttttattttattgtttttggttagaaatagaggtatttgttggtgaggtagtttgagttttttgatgtgtttttttgttagttttttggagtgttaggtggagtttagttttttatagtgttttttttatttttagttttagtgttttttttattggttttttttttttttttagtgtttaattgtgggttgtttaagttttaggtttggttttttgtttatttttttttatatttagttattattttattaaaatattttttttttgtggttttgattattatttgggtaaatgtttgtttgaaaatttattttgtgtttgttttattttaggtgttatttttgatggtttagtttttattgttaggatttattagttattgatagttagagggaagtttgggagtttttgtttttttttgttttttagttttttatatttaaggtggtatttggttttatattttatttttgaaaattttttaatttttttttgtagtgaagttatgtggtgtttggttaaaagtttaggttgtgagtttttagttttttgtattttagttttattgtttattagttgagtgatttttggtatgttattgaattaattgaattttaatttttttatttataaaatggggatgattttatttgttttatagggttgtggaaattaaaggaataaagtttttggtatagagattgtttattttgattttaataaatattagtttttatttatttttttattgatggtagattaatttttttaaattatgattttaggtattttttgtgtaaaggttttaagttgtatgtgtagatattttgattgaatgtagtgttagatgttatggtattaaatataagaattttaatttgtggttaggtatagtggtttatgtttgtaattttagtattttgagaggttgaggtgggtggattatgaggttaagagattgagattagtttggttaatatggtgaaattttattttattaaaaatataaaaattagttgggtgtggtggtatatgtttgtaattttagttatttgggaggttgaggtaggagaattgtttgaatttgggaggtggaggttgtagtgagttaagattgtgttattgtattttagtt

SEQ ID NO: 744 - DNA, 6225 bp, Artificial Sequence
  chemically treated genomic DNA (Homo sapiens)
ttgagagaaaaattatgttttaaagatatggttattaattataatgggtttagatattatataatagaaataaggaatatttatattagttagattaaaaggaggtgattagtattttagaataaatagggttttttttatttattatagagatttggtagtattatttagtatttttttgttttaagaatttatttaaatttttgttttttttattaggttttaaatatattaatatttgaaattgtagttggtaaaggatttagataattaattttttatttttaaagttaattttaaatgtttttatatgataatttaaatgttagaaattaaaaataaatttataaggtgttgatttgtaaagtgttttaggtaatagttattaattataaggtatatttaaagttgtaaagaaaaattaaaaagttaagttatagtttgatatatagttaaattttttagaatattaagaaaataaatttttatttttttttgatttttttttttttttttttttttttttagttttattttttttttttatgattttttttttatttatttttttttttttgtttttttttttttttttggtatttttttttttttttagttttatttttaagattttttataaaaaatttttgtttattaaagttattgtatagaaaaaattagaataatagaaggatttattgagttattatattagtaatttatgaagagaaaattggtgaatattttattttttagttttaaaggggaaattatattgttttaaatttgtatattgttagtttttaattgtttttgtttaggaaatgatttagaattatttaattagaataagaaaatggtattatttttttattgggattttaatttgatattaaaattagtatattaattttaaaaattatttagtatttatgtgttattaagatattaatatttgttaagatataattgttatgagttagatatttttataattagaattttaaattttaaaatttttgttttattttagaattgagaaaattttgttttagtattatattatagttttaagagtataaaaatgtaaagatgaaattagaattatagagaattggtgaaaaagaaagtaaaattaattaaaatgaatgtttttagattttttttttttttatataatgttatgtttttttgtaattaaataatttttaataagattataaaattttttaggaataatttggttaaaaaataaaattaatattatattagtattaaaggtgttattatatatggttttttattgagggtggaatgtaattttattatagttaagattagtgtttttgttttaattggattatagttagatatattttaatatttggtatttattttattaataaagaaaatttatttaatttgaattattatttttgaatttatttttattttgatttttatttttttattatttgagttgattttagatataggataagttagaatttattaggttataaaattaataaaatatatatatttaaaataaaatagttttatgttataaaggaaggttttttaaaattaaatattttatatttgaaatattaattttatatttatattttttttaatgatgttggaagggaataatatagttttgtgttaatatatatttttgattgttgttttattgttatggatatatattgataaaaatatataaatatataagaaattatttgttggtattttaatttgtaaatagttttatttttggttaagagagtagggttgaaaaatagtatttaaaatggtttaaaaagtaataatttagggaaaatagtttttttttaagggtattataaaatgttaaatattttaatagtaatatttttaaatgttgaaaataaaataataaagatatttatatattagggataaattttagttatagtatttttagatatttattgtattttagtaaaaaatatgaataaaattaaaagattaataatgtatttaatataaattattgtttaaataatgtaatttaattttaaatatttttttgtagaaaagtttaataaggtttttttttgtaaatattgttaatatagtagagtattatatggaattttatatgaatgatgagatagtaagtaaaattgaatgaattgaatttttaaaatttttataaaagtatttttaagtttattatagattgtatattatatttattaatttatgtaaattttttttttaaaaaatgtttagggttgataggtgtggtaaattattatggtatatatgttataaatatattatgtaataaatttgtatgttttgtatatttattttggaatttaaaattaaatttaaaaaagaaaaaaaatgttaattttatatatatataaaaatgtttggtatttggtaaagtaatgtagttaataagatatttttatatatgaagttttttgttataatagaaataaaagaatttaaatatatatttgaagaggtgaagtatttatatttatattatgattataagtttttagttttgttttataaagaatatttttgatttaaatagaaagattttaatagaaattttaatttattaatatagttgtaatattaaggtttttttttaaagttaatagtttttttttagataagtagagaggtagagaaagtgagtaagtaattgagagaaatatatatgagtgagaataggtaggaaggagaatattaaatttatttgatttttaaaaagtattgatttatattgttttttttttttaaataaataggatttatttttaataaaaatttatatttatataaaaaataaattttgttggatatgtagtgttttaaaagtttttgaatattgtagataatagtagttgtgatttgtattttataatatgttaaaaatttgatttatatggttgtagtgtgtagtgtgggtgaggttatgttagattaaggtgtgtatagaggttaggtattggttatgggagttatttttttaatttatgtgtttagagttgtaaatggagtagaattttatttagaaaaggagttgaattaagttgtatttttaaattattgtttatgttttaaaggtaaaaattaaattatattttttagattttttatttatttttgtttgtttgaataatttaagatgtagtgtaagtttgggagaaaagaaattttaatgtggagttaatagataagtgttttataaattaaaaaaatatttttttaaatttatgttttatgaggtttgtgttattttataagttagataaaatttatataaataatgatttgaagaatttataaagttaaaagaaggtaatagttataataaaatttgtaatattaagtttaatttgaaatgaataaaattattgaatttgattaatattaatgatagtgtaatgtttgaatgttatggtaaagttgttaaatatatagtgaggaaagttaagttttaaaaattataaataattttaaaatattgattaaaattgtaattttgtttaaatgaatatagagttttttattatataattatttaaaatatgttaaatatttagatggttattttttttaaaatgataatttagatattattatttgattgatgtaaagtttaaattaataagtttgttttgttgttttaagaaaatattaaaataaatttaaaattaaatattttaaaaataatttgtttattaggagaatggtgtgaatttgggaggtggagtttgtagtgagttgagattgtattattgtattttagtttgggtaatagagtgagattttgttttaaaaaaaaaaaaatgtttattattatatttttaaaattatattttaagttttgggatatatgtgtagaatatgtaggtttgttatataggtatataagtgttatgttggttttttgtatttattaatttgttatttatattaggtattttttttaatgttattttttttttagttttttattttgataggttttagtgtgtgatgtttttttttttgtgtttatgtatttttattgtttaatttttatttatgagaatatgtggtgtttggttttttgtttttgtgttagtttgttgagaatgatggtttttagttttatttatggttttgtaaaggatatgagtttatttttttttatggttgtatagtattttatggtatatatgtgttatattttttttatttagtttattattgaggggaatttgggttggttttaagtttttgttattgtgaatagtgttgtaataaatatatgtgtgtatgtgtttttatagtagtatgatttataattttttgggtatatatttagtaattggattgttgggttaaatggtatttttagttttagatttttggggaattattatattgttttttataatggttgaattaatttatatttttattaatagtgtaaaagtatttttatttttttatattttttttagtattgttgttttttgattttttaatgattgttattttaattggtatgagatggtattttattgtgttttttgatttgtatttttttaatgattagtgatgatgagtttttttttatatgtttgttggttatataaatgttttattttgaagattgtttgtttatattttttatttattttttgatggggttgttggttttttttttgtaaatttgtttaagttttttgtagattttggatattagtttttttttagatgaatagattgtaaaaatttttttttattttgtaggttgtttgtttattttgatgagagttttttttgttgtgtagaagttttttggtttaattagattttatttgttagttttggtttttgttgttattgtttttggtgttttagttatgaagtttttgtttatatttgtgttttgaatggtattgtttaggtttttttttagggtttttatggttttatgttttaggtgtatgtttttaatttattttgaattaatttttatatgaggtgtaaggaaggggtttagttttagttttttgtatatggttatttaatttttttaatattatttattaaataggaaattttttttttattgtttgtttttgttaggtttgttaaagattagatggttgtagatgggtggagttatttttgaggtttttgttttgttttattggtttatatgtttgttttgatattagtattatgttgttttggttattgtagttttgtagtatagtttgaagttaggtagtgtgatgtttttagttttgttttttttggttaggattgttttggttatataggtttttttttggttttatataaagtttaaagtagatttttttaattttgtgaagaaagttaatggtagtttgatggggatggtattgaatttttaaattattttgggtagtatagttatttttaagatattgattttttttatttatgagtatggaatgtttttttatttgtttgtgtttttttttatttttttgagtagtggtttgtagttttttttgaagaggttttttatattttttgtgagttgtatttttaggtattttatttttttagtagtagttgtgaatgggagtttatttatgatttggttttttttgtttgttattggtgtataggaatgtttgtgatttttgtatattgattttgtattttgagattttgttgaagttgttattagtttaaggagttttggggttgagatgatggggttttttaaatatataattatgttatttgtaaatagagataatttgattttttttttttttatttgaataatttttattttttttttttgtttgattggtttggttagaatttttaatattatgttgaataggaatggtgagagagggtatttttgtgttgtgttggtttttaaagggaatgtttttagtttttgtttatttagtatgatattggttgtgggtttgttataaatagtttttatgatttttgatatgtattttattgatatttagtttattgtttttagtttttagtataaaggggtattgatttttattaaaggttttttttgtatttattgagatatttatgtggtttttgttattggttttgtttatgtgatggattatgggtattgatttttgtatgttgaattatttttgtattttagggatgaagttgatt

SEQ ID NO: 745 - DNA, 6225 bp, Artificial Sequence
  chemically treated genomic DNA (Homo sapiens)
agttagttttatttttggaatgtaaggatgatttaatatatagaaattaatatttgtaatttattatataaatagaattaatgataaaaattatgtgagtattttaatagatgtagaaaaggtttttgataaaagttaatatttttttatgttaaaaattaaaaataataaattaggtattgatggaatgtatgttaaaaattataagagttatttatgataaatttatagttaatattatattgaatgggtaaaagttggaagtattttttttgaaaattagtataatataaggatgtttttttttattatttttatttaatatagtattggaggttttggttaggttaattaggtaagagaaagaaataaaggttatttaaataggaagagaggaagttaaattgtttttgtttgtagatgatatgattgtatatttagaaaattttattattttagttttaaaattttttaagttgatagtaattttagtaaagttttaggatataaaattagtatgtaaaaattataagtatttttatatattaataatagataaagagagttaaattatgagtgaatttttatttataattgttattaagagaataaaatatttaggaatataatttataagggatgtgaaggatttttttaaggagaattataaattattgtttagggaaataagagaggatataaataaatggaagaatattttatgtttatggataggaagaattaatattttgaaaatggttatattgtttaaagtaatttagagatttaatgttatttttattaggttattattgattttttttatagaattagaaaaatttattttaaattttatgtggaattaaaaaagagtttgtgtagttaagataattttaattaaaaggaataaagttggaggtattatgttatttgattttaaattatattataagattatagtaattaaaatagtatggtattggtattaaaatagatatatagattaatggaatagaatagaggttttagaaataattttatttatttataattatttgatttttgataaatttgataaaaataagtaatggggaaaggattttttatttaataaatggtgttgggaaaattggatagttatatgtagaaaattgaaattggattttttttttatattttatataaaaattaatttaagatggattaaagatatatatttaaaatgtaaagttataaaaattttagaaagaaatttaggtaatattatttaggatatagatatgggtaaagattttgtgattaaaatattaaaagtaatggtaataaaagttaaaattgataaatgggatttaattaaattaaagagtttttgtatagtaaaagaaatttttgttagagtaaataggtaatttatagaatgggagaaaatttttgtaatttatttatttgagaaagggttaatatttagaatttataaggaatttaaataaatttataagaaaaaaattaataattttattaaaaagtgagtgaaggatatgaatagatagtttttaaaataagatatttatgtggttaataaatgtatgaaaaaaagtttattattattggttattagagaaatgtaaattaaaaagtataatgagatattattttatgttagttagaatggtgattattaaaaagttaggaaataatagtgttggagaggatgtgaagaaataagaatgtttttatattattggtgggagtgtaaattagtttaattattgtggaagatagtgtggtgattttttaaggatttagaattagaaatattatttgatttagtaatttaattattgggtatatatttaaaggattataaattatgttattataaagatatatgtatatatatgtttattgtggtattgtttataatagtaaagatttggaattaatttaaattttttttaatgatagattggataaagaaaatgtggtatatatatattgtggaatattatgtagttataagaaaggatgagtttatgttttttgtagggttatggatgaagttggaaattattatttttagtaaattaatataagaatagaaaattaaatattgtatgtttttataggtggaaattgaataatgagaatatatggatatagggaggagaatattatatattagggtttgttggggtggggggttaagggagggataatattaggagaaatatttaatgtaaatgataggttggtgggtgtaggaaattagtatggtatttgtatatttatgtaataaatttgtatattttgtatatgtattttagaatttaaagtataattttaaaaatgtaataatgaatatttttttttttttgagatggagttttattttgttgtttaggttggagtgtagtggtgtaattttagtttattgtaagttttgttttttgggtttatattatttttttaatgaatagattgtttttagagtatttgattttgagtttattttaatatttttttaaaataataaaataaatttattagtttgggttttatattagttaagtaataatgtttgaattgttgttttagaaaagataattatttaaatgtttggtatattttagataattatatgatgaagaattttatatttatttaaataaaattatagttttagttaatattttaaaattgtttatgatttttaaaatttaattttttttattgtatatttaataattttgttatagtatttaggtattatattgttattggtattagttaagtttagtgattttatttattttaaattgaatttggtgttataagttttattatagttattatttttttttagttttataagttttttaggttattatttatataaattttatttggtttgtaaggtaatataaattttataaaatataaatttaaaaaaatgtttttttaatttgtgaaatatttatttattagttttatattaaaatttttttttttttaaatttatattatgttttgaattatttagataagtaaagataagtaaggagtttaaggaatgtggtttggtttttatttttaaaatgtggatagtaatttggaagtgtagtttagtttaattttttttttaaataaaattttgttttatttgtaattttgaatatgtaaattgaaggggtggtttttgtggttagtgtttgatttttgtgtatattttggtttggtgtgattttgtttatattgtatattgtagttatataaattagatttttgatatgttataaaatgtaagttatagttgttgttgtttgtggtatttaaaaatttttgaaatattgtatgtttaataaaatttattttttgtgtgaatgtaagtttttattgagggtaagttttgtttgtttggaaaaaagaaatagtatgagttagtgttttttaaaaattaaatagatttaatgtttttttttttgtttgtttttgtttgtgtgtgttttttttgattgtttgtttgttttttttgtttttttgtttgtttaagaaagagttgttggttttgagagaagattttggtattataattgtgttagtagattgagatttttgttagagtttttttgtttaggttagaagtgttttttatagaatagaattgggagtttgtaattataatgtaagtataaatgttttatttttttaaatatatgtttgaatttttttgtttttgttatagtaggaaattttatatgtaagaatgttttattagttatattgttttgttagatgttagatatttttgtgtgtgtgtggggttaatatttttttttttttttaaatttaattttaagttttgggatagatgtgtaggatgtgtaggtttgttatatagtgtgtttataatatgtgtgttatggtggtttgttgtatttattagttttggatattttttagaagaaaggtttgtataggttggtaaatgtaatgtgtaatttatggtaaatttaaaagtgtttttataaaagttttaaaggtttagtttatttagttttatttattgttttattgtttatgtaaaattttatgtagtattttattatgttaataatgtttatgaaaaaaagttttattagatttttttgtagagagatatttaagattaaattatattatttaggtaatgatttatattaagtatgttattgattttttagttttgtttatattttttattgaaatgtaataggtatttaaaaatgttgtaattaaaatttgtttttagtatataaatgtttttattattttatttttaatatttaagaatattgttattagaatatttgatattttataatgtttttaaaagaagattattttttttgaattattattttttaaattgttttaggtattgttttttaattttatttttttgattaagaatgaaattatttataaattaagatgttaataggtaattttttatatatttatatgtttttgttaatatgtgtttatagtaatagaataataattaaaaatgtatattaatataaggttgtattatttttttttaatattattggaagagatgtgaatatgaaattaatattttaaatatgaaatatttggttttgagagatttttttttgtgatataaagttattttattttagatatatgtgttttattggttttataatttgataaattttagtttgttttatatttgaaattagtttaaataataaggaaatagaagttagaataaaagtagatttagaaataatgatttaggttagatgagttttttttattgataaaataaatgttaagtgttgagatatgtttgattataatttaattaaaataaggatattaattttagttgtgataaagttatattttatttttagtggaaaattatatatgatgatgtttttgatgttgatgtaatgttaattttattttttagttaaattatttttgaaaaattttataattttgttgaaagttgtttgattatgaagaagtatggtattgtgtaaaaaagaaaaaaatttaaaagtatttattttggttgattttatttttttttttattagttttttgtagttttgattttgtttttatatttttatatttttagggttataatgtgatgttgaaataggatttttttaattttaaagtagaataaaagttttaaaatttgaaattttgattgtggagatatttgatttatagtaattatattttagtaagtattgatattttagtggtatataaatgttagataatttttaaaattaatatattaattttaatgttaaattggagttttagtgggagagtaatgttatttttttattttgattagatgattttgggttattttttagatagaaataattaggaattaataatgtataagtttaaagtaatgtaattttttttttaaggttggaagataagatatttattaattttttttttataaattattagtataatgatttaatgaatttttttgttattttaattttttttatataatggttttggtggatagggattttttataaaaggttttgggggtgaggttagaaggaaggagaggtattaagggagaaagggaaggtagagagagaaagatagataaaggaaaggttataaagaaggaagatgaggttgaggaaagaggaaagagagaaaagaagttagagagaagtagaggtttatttttttaatattttgaaagatttggttgtatattaagttatgatttagttttttaatttttttttgtaattttagatatgttttatggttagtaattgttatttaaaatattttgtaaattaatattttataagtttatttttggtttttgatatttagattgttatataggaatatttaaagttaattttggaaataaaaagttaattatttaaattttttattagttgtaattttagatattaatgtatttgagatttaatagggaaaataagaatttaaataaatttttgggatagggaaatgttaggtaatattgttaaatttttgtagtaagtgagaaaggttttgtttgttttaagatgttgattatttttttttaatttaattaatatagatattttttatttttgttatataatgtttaaatttattatagttaatggttatatttttaggatataattttttttttaa

SEQ ID NO: 746 - DNA, 6216 bp, Artificial Sequence
  chemically treated genomic DNA (Homo sapiens)
tttttttttttttataaatttaaaattgtagtagtttaataaataataaatattttggttttatgattattgttaaatagtttattagtaagagaaaaaaaaaaatgttgagttttaagaggggagaggaaaggtagtttttttgaagttgaattttttgtttaaattgttttagtaataaattttgttatttattggtaaaaaggaagaattaaaattaaaaggtgtttgttgtttttataggtagttagtagtgtgattgaaatagaatttttttagtggtgtttttggataaggggtttggaaatatgtgatttgatatggaatttttttttgtgttttgaatttattatggtttatttttaagttataatagttttttgagtagaggaggtatgttgtttttatggttttttttaaaattatattttttgagatagaattttattttaatagattagtggattttaattggatatattttagaggtttgattgattttgaaaatattttttttttttttttttttttgtttttttgtttttttttttattatggttaattgtagtttgaattttttgtgtttagttgatttttttgttttagttttttgagtagttgggattataggtgtgtgttattatgtttggttaatttttttgtagagatggggttttattatgttgtttaggttggttttaagtgatttgtttgttttagttttttaaagggttaaaattataggtgtgagttattgtatgtggtttttttttttttttttttttgagatagggtttttttttgttatttaggttggagtatagtggtattaatatggtttattgtagttttgatattttggggttatttgatttttttattttagtttttggtgtagttgggattataggttgaaaatatttttttaattttgttgttagtttgggtttttttttattttagtttttgaaatttattattttttgtttaatgggataggttagtggtgatgttggtttttggtgttagggtttgtttttttagattatgggtattatataaagataattgttttaaatggtattattgttttagagttattgaatgtttttaaggtgtatttgataaaataaaaatagttttttgttttgaaaatttttaagtatttttatattgggaaaatgttttttttttttttttgatagggttttgttttgttgtttaggttggagtgtagtggtgggattttaatttattgtaatttttgtattttgggtttaagtaatttttttgttttagttgggattattggtatatgttattaagtttggttaatttttgtatttttagtagagatggggttttgttatgttggttagattggttttgaatttttgattttaagagtgatttatttgttttggtttttgagagtgttgggattataggtatgagttattatgtttggttaataatgttttttttaatggtgttttttttattatttggatagatatatgaatttagttattaagatgatttagatttaaatataaaatattagtatagtagtttttgatttttaatattattttaaatttatttttttttattgttttttgtatttaaatattttttaatttttgagaaaattaagattattaaagattagtaatttatttgtgattgtgtgtgttggtggatattttaataaatttatgaataaagttaatattgttttgttagtgtttttattttttttttatgtttgtttatatttggaattttaaggtattatttagataattatttgatattttttgttggtatgatatgtttggttaattgttttggtaaaattatttatttattattgggaattaagtattgtaataattaaagaaagaggttatataagggaaattggaagaattatatgttatttgttttaatttttatgtagtatatttatatatgtgtgtaaaaaaaatgtaaattgttataaagtaatatattgatgaatttaaatgagtagagtataataaaagtaaaaattaaatagaagagtggttggagtgaggttataataaattaagagatattttttgaaggaagtgaatatgtttgtattttttagtatattgttatggatgttagtgttaggttaatatatagtattgtagtgtgatttaaaaaggtgagatagaggggaaataagatagttttataaatattattaaggaatttaagatatgagtattttatgtagggaggttgaaatgtattgttataattaggttgtgtaatttttttttgttaagatttatttatttattagtaatgatatttttttttttttttatttttgtttttttttttaggaaaaggaatatatgtttatttattatttaaaatttagagttatttttttgttttagttggttttgtttttggaattattaaagaagagtagaattaggtgtatgtgaaatttttgtttttgttttttttatttaattaatttttatttttttttaatttttatttttttaattattagttttatattatggtatttttttttggtttttttgtattatatttttataaaattagatgtatggggttgttaaaatattgtttggatatattatttattttgtattaagtggttttattataaaatttagttaaatatatattgaagtatttaaattgttttttttttaaataatattatattgggtattggattttttaattaaattattttttttattaaatgatattggttaatttaataagttattgtaggaattttgttaatttagtagtttttattattatgttattatggtaatgatttagttttttataaagttgtatttaaataggtgtttatagttattaattattaggtattttaagtattttttgaaaggggtttgtttgtggtggggtggggggtgttaatatagatatttttttagttatgtagttatttgaagttttttaggtagaagatagttgatagattatttggtgagtaaatgaataattggatgaatatttatttgggaatttttaaagaattgaagatagttttttggttattattgtttatagttatttattatgtgtttattttatgttaagtgttgggttggattttggggttattaaagggaagagaaaatttttattgttttgagggtagttaaaaatttaatggagggaagttgagagtatgagtgagtgtgttattttagttgggtgagtggtatattttgggaatagttgggagatttttagtggtgtgtgtttttttttgtttttagtatttgtttttttttagtttattgtgttttttttttttttggggtttaaggagtttaggttttattgtttgttttttagattgtgggagtaggagtagagagtgggtgtttgttatgggatagggggttttagagataggttttagtatgggaaggtagtggaaatttatgtattgttttttggtattgttatatgttttttgttgtttgttttttagttttttgtttttttttagttttgttagttttttgtttttgatattagtgatgaaagttaggtgtggggggattagattatttttattggttttgatagatttagatatataatagaagttatgataagtgagttagttttttatgtttgtttattgaagtttatattattttttatgttattaaaatatgtttgtttgtagttattgttaatgtagttatgtaaaattatttgagtgaaatagattttggggatttaattttaggatttaattattatttataaagtttttttggggaaaatgtgttttggattttgtatagttagtttataaatgagttttggaaatataatttatatgtaagttggagattttttattattagtatttagttttgtgaggagagtttttgttttgttagtaggtttatgtgtttttagttttaagtttttaaaattagtattatttgaggagtttgaattggtgtttttggagttttttagattagttatgagattttagaatttgtttattagtagtattgagtttaagaggaagtttaatttatattttttagaagataattttaagagagtgtgtatgtttttgttttgtgaataaaggaaagttaatttggtgttttgtgtttgttttgtaattttttaagggagaaggaaagggagggaaatgattgatttttagataggataaaaattagttagtatataatgggttattgttattgttttttgataaggattttattttaattatttgaagagattttttaaggtggaggatatagtggttatattagttatttttatttttgttattatggaaggtaaaatttttggattttagatttaattttaaaatagtaatttaataatgtttggtggaaattttttaaaaaaaatattttgtagtatatttttggtagttttgtgtttgagatgatttttaggttgttagtttagaagatggaagatataaattgtgttgatgagttggttttttagtggattttgttaggttttttttttaaaaaaataataatttttataatgagtatgtttttgtgagtttttataatttttgaagtttttatttgtttggtagaattaagggtattgaatgtttgtaagttgtttattaatatttataggaagggtataaaagggtgtttaagttagtttgtaggtggtgggggtggggtggaaagaggggatttttgtaggtttggatgaattagttattgatttttgatggtagttttagttgtaaaaaagtaggaagttttttttatggatagaattataattttttttttttaagttttttagtttttttatatttttttattttttagattttgtaagtttttaaataaaatgtttgtatttttttaaaggaaattatatagttgattgtattatgagagggaaaggagtaaattttgttttatttgaggaggggtttagattaggagttgtgtagggtttttatttggttgggggtggtggagttttggttgtgtgtaggagtgattgtttttggagatgttttggttggattatgagtttgggtttggaaagtattgttttaagtttattagtaggaatgaggtagaatttattatttgttgttttaagatttttttgtttgttaagtgtttgagtaattttttatattttttttttgaattaaagagtaataattggttaagagtttagtagggatgaaaaaggttggttttttgtattttttatttgttgtttagattaagggttgtattgtagattatttttggttatgttgttttgaatttgaggattagtagaattataggtttaattttaggtagatgtgagtttgtatttgatgataggtaagtatttatatgtgttttttattattttgttgttttaggagatgttgtttaagttggtagatatgtttatttgaaagtaaagtttgttgttggtgagattattgaatttataaaaaaaaaaaagtggggggattagatgttaagggagagggaagggagtgtgtagtatttaaaagtgtggtgaagttattaagttaataagaaaaagtagaataaaatgtggttttaatttgttgtattgggtttaagatgataatattgtaatagtaaattgtagggatgtgtgtgtgtaaatgtgattatatgtgtgtttgttttttgaattttaaaattgtagaagttattagaagttttaattttagtttttaatttaatttattttgatagtaaattagtaatttttaagggatttattgataattagaataaagatttgtaatttttaggatagatttttaattttgggggtgggaaggagttattttgtatttttttgaaattttgagttattggggttgaatatgtagggtagatattgaatgattaattttaatgtttttagtaattttgttaagtaaaattttgttgttatttagtggtaattggttatatggtatggtagttgtaaaatatgtttttttttgtttttttttttttagattttattttttttagatgtttttagtttttttttttagatggtatttgatatagtatttgataggaaaaattgattttatgtttggtttaggtaatttagggtaag

SEQ ID NO: 747 - DNA, 6216 bp, Artificial Sequence
  chemically treated genomic DNA (Homo sapiens)
tttgttttgaattatttaagttagatataaagttaattttttttgttaagtattgtgttaggtgttatttgggaaaaaaaattgggagtatttgagaaaggtggaatttgagggagaaaaggtagaaaagggtatattttatagttattatgttgtatagttaattgttattggatggtagtggggttttatttagtaaagttgttaagagtattaggattggttatttaatatttgttttatatgtttggttttagtaatttaaggttttagggaaatataaagtagtttttttttatttttaaaattggggatttgttttagaaattgtaaatttttgttttgattattagtaaattttttgaaaattattaatttattattagagtaaattaaattgggaattaaaattagaatttttaataatttttataattttgaaatttagaaagtaagtatatatgtaattatatttgtatgtatatatttttatagtttattattgtaatattattattttgagtttagtataataaattggaattatattttattttatttttttttgttaatttgatggttttattatatttttaaatgttatatattttttttttttttttttggtatttgatttttttatttttttttttttgtaaatttagtaattttattagtaataagttttgtttttaaataagtatatttgttaatttaaatagtattttttaaggtagtggagtaatgaaagatatatgtaggtatttgtttgttattagatgtaagtttatgtttgtttgaaattgggtttgtaattttgttgatttttgggtttaggatagtatggttgagagtggtttataatgtggtttttagtttaaatagtagatgaaggatgtaaggggttaattttttttatttttgttgggtttttgattagttgttgttttttagtttaagggggagatgtgagggattgtttaaatatttggtagatagaaaggttttaagatagtaagtagtgaattttattttatttttgttgatgaatttgaggtagtgttttttaagtttaaatttatgatttaattagaatatttttaagaatagttatttttgtatatagttaaggttttattatttttaattgggtgagggttttatataatttttgatttgagtttttttttagatgagatagagtttgttttttttttttttataatgtagttaattgtgtgattttttttggggaaatataaatattttgtttaaaaatttgtaaagtttgaagaatggaaaagtgtgaaaaggttgaaaaatttgaaagaaaggagttgtagttttgtttataaaaaaagttttttatttttttgtagttggggttattattagaaattagtggttgatttatttaggtttataggaattttttttttttattttgtttttattatttatagattgatttgagtatttttttatgttttttttgtaagtgttagtgaatggtttataaatgtttagtgtttttagttttgttaaataagtaaaaattttaagggttgtgagggtttatgaagatatatttattataaaaattattatttttttaaaaaaggaatttaatagggtttattgaaaaattaatttattaatatagtttatattttttattttttgaattggtagtttaaaagttattttaagtatagggttattagagatgtgttgtaaagtgttttttttaagaggtttttattagatattattaaattattattttaaaattaaatttaggatttaggaattttattttttataataataagggtgagagtaattaatataattattgtattttttattttgaagaatttttttagatagttgaagtaggatttttattagaaagtggtggtagtaatttattgtgtgttgattggtttttattttatttggaaattaattattttttttttttttttttttttttggggaattataaaatagatatggagtattagattaatttttttttgtttataaaatgaaaatatatatatttttttaaaattattttttgaaggatatgaattaggtttttttttgagtttagtattgttggtaagtaggttttgaagttttataattaatttaaagaattttaagagtattaatttaagttttttaagtagtgttggttttaggaatttagggttgaggatatataggtttgttaataaagtaagggttttttttgtagggttgaatgttaataataggaagtttttaatttatatgtggattgtgtttttaaagtttatttgtaagttggttgtgtgaaatttagaatatattttttttaaaaaagttttataaatggtggttaggttttgagattagatttttaaagtttattttatttaagtgattttgtatgattatattggtaatgattgtaaatgggtatgttttggtgatataaagggtaatataaattttagtaaataaatatggaaaattaatttatttattatagtttttattatatgtttaagtttattaaggttaatggaaataatttaatttttttatgtttgatttttattattgatgttagaggtaaggagttgatggagttggggaaaagtaaagggttggaaggtaggtagtagaagatgtgtggtaatgttagagagtaatgtatgggtttttattgtttttttatgttggggtttgtttttaggattttttgttttgtggtaggtatttattttttgtttttgtttttataatttgaggagtaggtagtgaagtttaagttttttagattttagagagaaaagaaatatagtgagttggagaggagtaagtgttaagggtgaaggaagatatatattattgggggttttttagttgtttttaaggtgtgttgtttatttagttggggtggtatgtttgtttatgtttttagtttttttttattaagtttttagttatttttaaggtagtgaaaatttttttttttttttggtgattttagaatttagtttaatatttggtatagagtaagtatataatagatgattgtgaatagtgatggttagggaattatttttagttttttaggggtttttagatgggtatttatttagttatttatttgtttattaaatagtttattaattgttttttatttgaaaaattttaaatggttatgtgattgagaaagtatttatgttaatgttttttattttattataagtaggttttttttaaagagtatttgaaatatttggtaattggtgattataaatatttatttaaatgtagttttatgggaagttaagttattattatagtaatatagtagtagaagttattgggttaatagaatttttataatggtttgttgaattaattaatgttatttagtgaaagaaatagtttagttaagaagtttaatgtttaatatgatgttatttaaaaaagaaataatttaaatattttaatgtgtgtttaattggattttgtgataggattatttagtgtagggtagataatatgtttaggtagtattttaataattttgtatatttggttttatggaaatataatataaaaagattaagaagagatattatgatatagaattgatggttgagagagtaaaaattaaaaagggataaaagttgattgagtagaaaaagtagaaataaaagttttatatgtatttaattttatttttttttggtggttttaggaataaaattaattggaataggaaaatgattttgaattttaaataatgagtaagtatatatttttttttttaaaggaagagataaaaatagaagagaaagaaggtattattattggtaaatgggtaggttttgatagaaggaaattatatagtttgattataataatgtattttaatttttttatataaaatgtttatgttttaaattttttggtaatatttatgaagttattttattttttttttattttatttttttgaattatgttgtaatattatgtattagtttaatgttgatatttatagtagtatgttggaaaatgtaaatatgtttattttttttagaaaatattttttggtttattatggttttattttaattatttttttgtttggtttttgtttttattatgttttatttatttaaatttattaatatgttgttttgtaatagtttatattttttttgtatatatatataggtgtattatataaaaattgaaataaataatatatagtttttttaattttttttgtatgatttttttttttagttgttatagtgtttagtttttagtggtggataaataattttgttaaaataattgattaaatatgttatgttaataaagggtattaaatgattatttgggtagtgttttagaattttaaatatgaatagatgtaaagaaaaaataaggatattaataaaatagtattggttttatttataaatttgttaggatgtttattaatatatataattataaatagattattaatttttggtaattttaatttttttaagaattgaagggtgtttagatatagaggataatgaggggaggtggatttaagataatattaagaattaaaaattgttatgttagtgttttatatttaaatttaagttattttagtaattgaatttatatatttatttagatagtggggaaaatattattaaaaagaatattgttggttaggtatggtggtttatgtttgtaattttagtatttttggaggttgaggtagatgggttatttttgaggttaagagtttaagattagtttggttaatatggtaaaattttatttttattaaaaatataaaaattagttgggtttagtggtatgtgttggtggttttagttgaggtaggagaattgtttgaatttaggatgtagaggttgtagtgaattgagattttgttattgtattttagtttgggtagtagagtaagattttgttaaaaaaaaaaaaagaatatttttttagtatggaaatatttgagaatttttaaaataaaaaattgtttttgttttattaaatgtattttaaggatatttaatgattttggggtaatgatgttgtttagggtagttatttttgtatggtgtttatgatttggaaaaataggttttggtattaaaggttaatgttattattggtttgttttgttgggtaggaaataatggattttagaggttggaatgaaggaaagtttaaattaataatagagttagaaaaatgtttttagtttgtagttttagttatattagaggttgaggtaggaggattaggtgattttaagatgttaaggttatagtgagttatgttgatgttattatattttagtttgagtgatagaggaagattttgttttaagaaaaaaaaaaaaaaaaggttatgtgtagtggtttatatttataattttagttttttaggaggttgaggtagatagattatttgagattagtttaggtaatatggtgaaattttatttttatagaaaaattagttaggtatggtggtgtatgtttgtagttttagttatttaggaggttgaggtgggaggattaattgagtataggaggtttagattgtagttagttgtggtggaaagaaaggtagaaagatagaaagaaagaaaaaagaaaaatgtttttaaaattaattaagtttttaaaatgtgtttaattaaaatttattgatttattaaaatggaattttattttaaaaaatataattttaagagagattatgagagtagtatattttttttatttaaaaaattattatgatttagagatgagttatgataaatttaaagtatagggaaaagttttatattaaattatatatttttaagttttttatttaaaagtattgttgaaagaattttattttgattatattattaattatttgtgagaatggtaaatattttttagttttagttttttttttttattaataggtggtaagatttattgttaagataatttaggtaaaggatttagttttagaaagattgttttttttttttttttttaaggtttagtattttttttttttttttattaatgagttatttgatagtaattataaaattaaaatatttgttatttattaagttattgtaattttggatttgtaaaggaaaaagaa

SEQ ID NO: 748 - DNA, 6216 bp, Artificial Sequence; identical to SEQ ID NO: 746
  chemically treated genomic DNA (Homo sapiens)

SEQ ID NO: 749 - DNA, 6216 bp, Artificial Sequence; identical to SEQ ID NO: 747
  chemically treated genomic DNA (Homo sapiens)

SEQ ID NO: 750 - DNA, 6204 bp, Artificial Sequence
  chemically treated genomic DNA (Homo sapiens)
aaaaaaatgttgtggtgtagtggtagtggtagtgtttggttaggaggtgtggaggggtttagggatggttatttttatagggagttagggagggtttggggtgatagtggaaaggttaagtgttgaaaaggttaagtgttattgtggagagattatttgagggggaggtttttggtgggatagttattaagaattgtgatatagaaggggaagggggagggtttttttgttataaagattaaaaatttttaaaatgtatttgaataatataatatataataataaatttaaattttgtttttttgttttattgggtaaattttggtttattttttatttttggttttattttaggggtttagtttttgatgatgtttttagagatatggttttagtgttggggggttgttgtgtgtttgttatttttaggagagggtgttggttagtatattatagtgaggttgtatttggtgttattaggttgaattgaggtttagggttttagagagatgatagatagttggtgatagatagtttagggtggttggttgatagagtgaggggatatatgggtaggatttgtttggttttttaatgttatattgtgtatagttgtagaagtttttaatatttttttatgtgaattggattgttttgagggttgaggttatatttggagaataaattggatgaaataaattaaaatttgtaggatagtttttttttttattttgttgtgggggagggtgttgtttatagtataaaaatgtttttttatttgggtttgagaggatagtgtggttttttttaaatgtatttgagaaataaaaattattaaatatagattatggtatgaggttgtttttttatttttttaagttattgtttagtgtagtttattgttgttttaggttgtgttgttggttgagtaggagaattgggggaagtggggtttgtgtttgttgtttatatattttatgttgttatttgtgggtgtagatagtttagattttggtgttttatttttttgttatttttatttatttatagttttagtaggaagttaattttttaaagtatggttagtatgttgttatattgttaggaaattgagatagggttttatagattgatatagggatttgggtttttagagtattgttttttattttgattattggtattttttaaaaggaatttttttaaatatttagattttaaaatatttgaagttaaaaaagttgaatattgtaggtttttttgagtgtggagagaaaagggagtgggtgggggtaggtagtggttttttattttggttaggtggtgtgatggtgattatttgggttgtgaattttttattaaaatatttggtgttagtttttgatgtgatttggggtttgaagggtgggttgagttgtagaggtgggtagatgggatagttatgagttttgttttttatttttagtatatttttaagtgtgtttaagatttttaaagtatttggatttttaaggggtttttaggtaggattgatgttagagagtagtaagttattagttttttatagaggtagttttgggagggagggatatgaggggtgtaggagtatggagataatttttaatagttgagatgtaaagttgtttttatagtagttttagtaggtgataggaggtagtgtagtttagttttgagagattttttttgttattaggaggtgataattttatttttttttttttttttttgtttttttattttttttattggtttttttgtaaattgggaaagagggagattgtggaataaggtgtataggatgagtttattttgtttttatggtttagggattataggattatagtttgttggtatttggttgtagataggatttttaatgatttaggatgaagggtgattataaggtgatgtgtatatgtgaggagttgttagagagttttttaggttttatagttaaggatttttttaagtattgttttattttagagtttgggttgggtattagtattgtttattgttaattagtaaggtttttggttaaggttgggtagaggttgagtattgtttaggttttttatatttttggagggtagggtaggagggtggtaggttttaaggtaggaatggggattaggattagggtattttgtgttaatgggagaataggtgtttagttgggttttagggttgtttagtttgattagttgtatatagtttaggataggtatttaggggaggggtaggttgggaatggggtagaagtatatttggtgatagggtatttagtattttagagtgtaggtttttgaatttagttggtagattttattagttggggtgatggttagggtttttagggtttttgaaagatgagtatttaggatggtgatttatgtagaaagagttgtttttttttagggtggatttttttatgtgttagaaaagtaggtgttgtttttgtttttgtatagttagaaatagggttgggttttttttgtggtagaagggattgaggttaaataggaggaatttgtggaggttaaggggtagtatttttggtttattattagttagtttttattgtatagtgttagggaagggaattttaaggttggtatttagagtgtgatatatttttgaggggaggaggaaatttagagtgtgatatatttttgaggggaggaggaaatgaggattaggttagttttttggtggaatttggtagtgttagagtttttgagtattaggtgttgaggttggtgtagtaaggttttttttgtattaggattgtagtaggtttttgaggtgagggtgagtgtgtgggaaatttggtgagtgtgttatgtgtatgtgtgagtgtggatatgtggggagtatgtgtgtgtgtgaatatgtggggagtagttgtattttttttttgtatatgtgttgttatatgatattggtaaagaagtgatgttgtatgatttttttggtgtttttggagtttttgttaagtttgtaggtaggaaataaggttatagtgttggtattgttatttgtttaggttttgggtttaggttttttttttttgtgatgtagggtttgttagataggatgttttggggttagggaggggagttggtggtgtagtgtttttgagtagttgtgggtagtaaagtattatagagtttatggtagggtaggggttttttgagtgggtgggtgtaggttgtagggttggggatagaggtttaattgattttggtttgtttgttattttgtttgggtttgaggttttggagattagttttggttaaggatattaagttttggttattagtgtagtttgggaggtgttaggattgtttggtgtaggggtaggtgtagtttggggatgaggggatggaggtgtagtttgtagttgggatgggtggtttttatttttgtttggggttttttttgagtagttttgaaagtaaggatttggttttgggattaagtgtgtgtgggaagtggattttttttatgaggatgagtttaaaaagttttttatggttttggttgtagaagggtaggtgattgtatattattttgtatatgattatgtttagtttttattagtttattgtatggttgtagttattgttttttagtatttgtatgggtggtagatgggtaggatttggtattaaggggtgtttgggatattgttgggggaggtgtgatgtgtttggggtatagagaggatatagtattgtgtgtgtttaggatgtggggatgtagtaatgtgtatgtatgtaggtggggtgtatattttgggggttaggtatttaggtgtgttgtaaaaggtttttatggtggtattgtttttgattttttttttgtatagtttgaagtttgtgattttaatgtgtttgtttttgtttagtatgaggttttttagttaggggaaaggtggttttaggttagtgttgttaggtttttagggttttgtttttttgtttgtttgttagtgtattttgaggttttggtatattatgtttttttttgagtgtaggtagtttagggttgatataattttagtgttatagaagtgggtttggtttttggagaatatatgtttttgggataggtggaagaatagttgtgggaggtgtaatttgaggtatagttgtggtttgggtttttgtttttatggtttgtagggttggggttttttagattgggttttggtattgtatagggaagggattagttattagagggtatgggggtttggaaagttttagaagttttaatttagtaggaataagttattttatagtaggtagttgtttgggtaggtattatattatttatttagtagggagtattgtttggtgttatggagagtagttgaggttttgggaaggattggttttattatgggtggtttataggttgtgaagtttattttttgtagttttagtttttattttgtttttgttggtgtattttatgataaagtagaggtggttgtgggtttggaaagagtattttagggtttgtaaggaaggggagttggaattgtggttttataggtaggatggtagttttgtattatgttgtttgatattatgttgtttgatattatgttgtttgatattatattgtttgtagttttatattatattgtttgatattatgttgtttgatattatattgtttgatattatattgttttatattatatattttattatattgttttatattatatatttttatattatattgtttttatgttatgttgttttatattatattgttttatattatattgttttatgttatgttattattaggttgggttttggtagtttttgaggtgttaaggagtgtttgaaaggtgagtaaggtggtttgggtttaggttttttagggtgagttgggattttagtaggggatagtgtttttagtattagggtttttgtaaagggaggatatatttttttaggtgagatttatttttttgttttttattataggtgattgtgtttttaaagtaaaggttttatttgtaggagaattgtttttaaatatagtgatttggaattaattaagtggttggattttggttttttttatagtaaatattttttgggttaagtttttagaataggttttgtaggatagagtttgggttttaataaaagtttggtaggtagggttgtagggtatggggagttggggttttttggagttttggtagagtgtaaggaagattagggttatttgttttatttatttgtttgtatatgggagtagtgagtatagtttttagtttatattgggtatttttatagtttgattttttagggtaggtttgttttattagtggtggagtttatggtgtgtaaagtttttatgtgtttaagaagataggatattgttttttagagatagttttaggagttgttatttggttttagttttttagttttatttgggtttttatttattgtgaggaaggggtgtttggagttttgtaggatgtggtttttggtgagtgtgtgggttattttgttttgtaaagtagggttgggtgagttgttattttgtatttttatttttattttgttttattgttttggttttattttggttatgatgattttttttttgaggatttttatggtgtagtagtggtttgtggtttttttttttattaggattattttgttgaaagtgtttttgtttagtagttttaggtatttaaatttgtttatggtttatgggtaggtattagggttagtaagtggtgttgttaatagtgtttagttggttggtatgtgtggggtggtatgaggggttttagagttggaggtagagttaggagaggtgtttattttatatttggtggtttattgggtttagtggggagtttaggtttatagggaatatatggttgtggttttagtttagagtatggggtttagggaagggtggggtaatattgtttaagtttggtagggtttagtaattttagtttttttttgatatggggaagaggatttatttgggaagtagttgtgttttatatggaaaattggtttaggtggagatgttgtggagtgttgagtgttttttgggttgagttgggattttatgatttatttagttttttatagtttaaggtagttttaggtataggtagaagtg

SEQ ID NO: 751 - DNA, 6204 bp, Artificial Sequence
  chemically treated genomic DNA (Homo sapiens)
tatttttgtttgtgtttggggttgttttggattgtggagggttgggtgggttatggggttttagtttggtttaggagatatttagtattttatggtatttttatttaggttggttttttatgtagggtgtagttgttttttaggtgggtttttttttttatgttagaggaaaattggggttgttgagttttgttaggtttgggtaatgttattttatttttttttgaattttatgttttgagttggggttgtagttatgtgttttttgtaagtttggattttttgttgagtttagtaggttattaggtgtgaagtggatgttttttttggttttgtttttgattttggggttttttatgttattttatgtatgttgattagttgggtattgttggtagtgttgtttgttgattttggtgtttgtttatagattatgaatgagtttgagtatttgaagttgttgggtaagggtatttttggtaaggtgattttggtgaaggagaaggttataggttgttattatgttatgaagatttttaagaaggaagttattgtggttaaggtggggttggggtggtggggtagggtggagatgagggtgtggggtggtagtttatttagttttgttttataggatgaggtggtttatatatttattgagaattgtgttttgtagaattttaggtattttttttttatagtgagtgggagtttagatggggttgaagggttggggttaggtagtgatttttggggttgtttttaggggatgatgttttgtttttttgggtatgtgagggttttatatattgtggattttgttgttggtgagataggtttgttttggagggttaggttgtggaggtgtttagtgtgggttaggggttgtgtttgttgtttttgtgtgtgggtaggtgggtggggtaggtggttttggttttttttgtattttgttgaggttttaggaggttttagttttttatgttttgtagttttgtttgttaggtttttgttgaggtttgggttttgttttgtagaatttgttttggggatttggtttaggaggtatttattgtgaagggggttagggtttagttatttggttagttttaggttattgtgtttggggatgatttttttgtagatggggtttttgttttaaaagtatagttgtttgtggtggaaggtgggagggtgggttttgtttgggagggtgtgttttttttttgtgaaggttttggtgttgggagtattgttttttgttgaggttttaatttattttggaggatttgagtttaggttattttgtttattttttaaatattttttggtattttaggggttgttggggtttagtttgatggtggtgtggtatgaggtagtgtggtgtggggtagtgtggtgtggggtagtgtggtatgggggtagtgtgatgtgggggtgtatggtgtggggtagtgtgatggggtgtgtggtgtggggtagtgtggtattgggtggtgtggtattaggtagtgtggtgttgggtagtgtggtgtggggttatgggtggtgtggtattaggtgatgtggtattaagtagtgtggtgttgggtagtgtggtgtggggttgttgttttgtttgtggggttgtagttttagttttttttttttgtaggttttgaagtattttttttagatttatgattgtttttgttttgttatggagtatgttaatgggggtgaggtaggggttggggttgtgggggatggattttgtggtttgtgggttgtttatggtggggttggttttttttggagttttggttattttttatggtattagatggtgttttttgttgggtgggtggtgtgatgtttgtttaggtagttgtttgttgtggggtgatttgtttttgttgagttagggtttttgagattttttaggtttttgtgttttttggtggttggttttttttttgtgtaatgttgagatttggtttgagaaattttagttttgtaggttatgggggtagaggtttgagttatggttgtgttttaggttgtgttttttgtagttgtttttttatttgttttgggagtgtgtgttttttgaggattgggtttgtttttatggtgttgagattgtgttagttttggattatttgtatttggagaagaatgtggtgtattgggattttaaggtgtgttggtgggtaggtaggggggtagggttttgggggtttggtggtattgatttgaggttattttttttttagttggagaattttatgttggataaggatgggtatattaagattatagattttgggttgtgtaaggaggggattaaggatggtgttattatgaagattttttgtggtatatttgagtatttggtttttgaggtgtgtgttttatttgtgtgtatatgtgttgttgtgtttttatgttttgagtatatgtaatgttgtgttttttttgtgttttaagtatgttatattttttttggtagtgttttggatattttttgatgttgagttttgtttatttgttatttgtgtaggtgttggaggataatgattatggttgtgtagtggattggtgggggttgggtgtggttatgtatgagatgatgtgtggttgtttgtttttttataattaggattatgagaagttttttgagtttatttttatggaggagatttgttttttgtgtatgtttggttttgaggttaagtttttgtttttagggttgtttaagaaggattttaagtagaggtgagggttgtttattttagttataggttatatttttatttttttatttttaggttgtatttgtttttgtgttaggtggttttggtattttttagattatattgatagttaaagtttgatgtttttggttagggttgatttttaaagttttaggtttaagtagagtggtgggtaggttggggttagttgggtttttgtttttaattttgtagtttgtatttatttatttaggaagtttttgttttgttgtgagttttgtggtgttttgttatttatagttgtttagggatgttgtattattggtttttttttttggttttggaatgttttgtttggtgggttttatattataggaggaaggggtttgaatttagggtttgggtaggtggtggtattgatattgtggttttgttttttgtttgtaggtttggtgggggttttgaggatgttaaggagattatgtagtattgtttttttgttggtattgtgtggtagtatgtgtatgagaagaaggtgtggttgttttttgtatatttatgtgtatgtatgttttttatatatttatatttatgtatgtatgtggtatgtttgttagattttttatatatttgtttttattttaggagtttgttgtagttttggtataaggagggttttgttgtattaattttagtgtttggtgtttagaggttttggtattgttgggttttattaggaaattggtttggtttttatttttttttttttttggaggtgtgttatattttgagtttttttttttttttggaggtgtgttatattttgagtgttagttttggggtttttttttttgatgttgtgtagtgaaggttggttggtggtggattaggggtgttgttttttggtttttatgagttttttttgtttgattttaattttttttgttgtaaggagagtttagttttatttttggttgtgtagggatagggatagtatttatttttttggtatatgggggagtttgttttggagggaggtagttttttttgtatgagttgttattttgggtgtttattttttagggattttaggagttttggttattattttagttgatggggtttgttagttgggtttggaagtttgtattttgagatgttgggtgttttgttattaggtgtgtttttgttttgtttttagtttgttttttttttgaatgtttgttttaggttgtgtgtagttggttgggttgggtagttttgggatttagttgggtatttgtttttttattaatatagggtgttttggttttggtttttgtttttgttttgaggtttgttatttttttgttttgttttttaagggtatggggggtttgggtagtgtttaatttttgtttagttttgattagagattttgttaattgataatggataatgttggtgtttagtttagattttggggtggggtagtgtttgagggggtttttgattgtgggatttgaggggttttttggtagttttttatgtgtgtatattattttatagttattttttattttgggttattgagagttttgtttgtagttagatgttagtaggttgtggttttgtagtttttgagttatggaggtagggtgggtttattttgtgtattttgttttatagttttttttttttttaatttataagaagattaataagaaaaataagaaaataagaaagaaaaaggaaaaataaagttattattttttggtagtagggagggttttttagagttgggttgtattattttttgttgtttgttggggttgttgtgagggtagttttgtgttttagttgttgagggttgtttttgtgtttttgtattttttatgttttttttttttagagttgtttttgtggggggttggtggtttgttgttttttgatattagttttgtttggagattttttggagatttaggtgttttgaaggttttgagtatatttgagggtgtgttgggagtggggagtgaagtttatgattgttttgtttgtttatttttgtagtttagtttattttttaagttttaggttatgttggagattgatattaggtattttgatgaggagtttatggtttagatgattattattatattatttgattaaggtgaggggttattgtttgtttttgtttatttttttttttttttatatttagagaggtttgtagtgtttagtttttttggttttagatgttttaaaatttaaatatttaaaaaggttttttttggagagtgttaatgattagggtgggaggtagtgttttgagggtttaggtttttgtgttaatttgtggggttttgttttagttttttggtagtatggtagtgtgttggttgtgttttaagaggttggttttttattggagttgtgggtgggtggaggtggtagggaggtggggtattggggtttgagttgtttatatttatagatgatagtatggagtgtgtggatagtgagtgtaggttttattttttttagtttttttatttggttagtggtatggtttgaggtggtggtggattgtgttggatgatagtttggagggatggagaggtggttttgtgttatgatttgtatttaatggtttttattttttgggtgtatttgagagaagttatgttgtttttttgagtttagatggaaagatgtttttgtgttgtgggtagtatttttttttgtagtggggtagggaagaaaattattttgtgggttttaatttattttatttagtttgttttttgggtgtggttttagtttttagaataatttgatttatgtagggaaatgttaaggatttttgtagttatgtgtaatgtggtattggggggttgggtaggttttgtttatgtgtttttttattttgttagttagttgttttgggttgtttgttattagttatttgttatttttttggggttttgggttttagtttaatttggtggtattagatgtaattttattatggtatgttggttagtatttttttttgggggtggtaggtatatagtagttttttagtattaaggttgtgtttttgaggatgttattggaggttgggtttttgggatgggattagggatgggggatgggttagggtttatttagtgggatagaggagtaaggtttaaatttgttattgtgtattatgttgtttaaatgtattttgggggtttttaatttttgtgataggaaagtttttttttttttttttttgtgttatagtttttggtgattgttttattgggagttttttttttagatgatttttttatggtagtatttgatttttttgatgtttaatttttttgttgttgttttaggttttttttgattttttgtgggggtggttatttttgggtttttttatgttttttggttagatgttgttgttgttgttgtattatggtgttttttt

SEQ ID NO: 752 - DNA, 6186 bp, Artificial Sequence
  chemically treated genomic DNA (Homo sapiens)
tgggagtgagggtggggttggatagttggtttttttgggtattttttgttttttttgtggttttgttatatgtttttatatggtagttttagggtaattatgatagttgaaggttttagagtgggtggagggggagagggagggagggaaagagagagagagagagagagagagaaagagaagtaagtaggtagaagttttaatgttttatgatttaattttggaaataaattatattgtgttattgttattatttttttttagaagtaagtagatagggttggtgaatatttattgagaggggaattagattttattttttgattgggggagtgttaaagaatttgtgaatatgtttttaaatgattatattttttttttttaaaatgtttgtttaaattggtgtatataaaaagtttgggggttagtgatttatttaaggttattaagttgttaaatggttttattaatattagatttaattttgtgattttaaattttatgtttttttttattattttagataatttttggtgaatattattgtttattagggtagttaagatattttagttgttaaatagatttagtttttttaattgttttggataatatattttttattttgtagaaaataaatattatttatatggtagttatttataaatattttttaagtttattttaaatatttgtgttttaaatttttttttttaatagatgtatttatttgtatttttttagatgaattattttttttttgttgttgttgttatttttgattgtattttttattttttaagatttttttgtattattaagtttattgtttaagttaatattattttttaatttggggatttttttttgatttttgtgtgttttttttgtgggttattaatgtaatgttatttaagattaggatttggttgggtgtagtggtttatgtttgtaattttagtattgtgggaggttgagttgggaggattatttgaggttaggagtttaagattagtttgattaatatggtgaaattatgtttttattaaaaatataaaattagttgggtatagttatatgtttgtaattttagttattgggtagtttgaggtaggagaattgtttgaatttgggaggtggaggtggagtttgtagtgagttaagattttataattgtattttagtttgggttataagagtgaaaatttgttttaaaaaaaaaaaaaagattaggatttgatataaggtttgaggggtatttttttgttttgttttgttttgtttttaagaggttaaaatttttatagttgaaaatttttgttgaattatagagatttgaattaatttagtttagaaagtttggggatttgaataatggtatggattggaaatttttttatttgttagtttttattattttaggtagtaaaatagatttttttttaggagttttttattgtttggggttttttagtagtgggatgtggggaattaatttttttttgtttttatttaaatattaggtgggagtaaggggtgggaagtagagaaagtggatagaggtttttagtggatatgggatttttgtgtagattagtatagtttttagaaattttatgtaagtaatataggtattgttatattttttagtggttattttttaaaaagtaaataggtgaggttgggtgtggtggtttatgtttgtaattttagtattttgggaggtttaggtgggtggattatgaggttaagagatggagattattttggttgatatggtgaaattttgtttttattaaaaatataaaaattagttgggtatggtgatgtgtgattgtagttttagttattggggaggttgaggtaggagaattatttgaattttggaggtggaggttgttatgttttattatattttagtttggtgatagagtgagattttgttttaaaaaaaagaaagtaaataggtgaaattaattttaataatatattttgtttaatttaatgtatttaaaatattattatttgaaagtgtaatgaatataaaaatatttatgagatattttttatttttatatttatattgttttggattttaatgtgtattttatatttatagtataattaatttgggattagttatattttagtttaataatagttaatagtatatgggatagtgtaaataaattttgtgtttttgttgtttttttgggttttggagattttaattttttttttagattgtaaatttttttgtttttaagttttggttttaatattagtttggtagaggaatttagtttaatgaggtatgttttttttttgttattttttattttattaatttgttttgtggtaaatgtaggattgattttttaaaattattttattaattagtttatatatttattatttatttgttttattagaatgtaggtttttggaaggtagggatttaaaaaaatttgttttgttttatgtgatttttttatattaagtattgtgtttggtataagttgggattttagtatatattttgggatggaagaattgtgtttttttagaatttagttagagggtagtttagtaatgtgttataggtggggtgtttgtgttttgggtggatgtattggttttttggttggtgtgggtgtggggtgagtgggtgtgtgtggggtgtgtgtggtagagtgtgttagtgagtttggagtgtggagttgggaggagtagtgagtgttgtgtagaatttgtagtgttggtttggtagggtagtttggaggtgggtgggttgtgttgttagtttgtttgtagggtttttattggttgtttgttggttgttttttgtttaaaaggtggtaaggagttgagaggttgttttggagtgtgaggaggatagttggattgagttaatgttggggattttgttttttttgtggaggggatttggtaatttgtagtggtagggtttggggttggtgtttgggagggatttgtgttttttatttattttttagttgtgtttttgttgttgttttggttagtttttggtgttggtgtttatggttggtttttgatagtgttttggagggattgggggagtttttaggtgtttgggtgagtagttaggtgtggttttttggtttttttgatttttggtgttagtttttgtttttttagttagggtgtggtggggtttgtttgggtagtgttttgagtaattgggaaggttaaggtggagggaaatttggttttggggagaagtgtgattgtagttgggaggtttttttagttttgtgggttgggtgagaataggtggtgttggtttgattaggtgttttgtgttggggtgtgaggatttggagtgaattgttgtgttttggtgggttgttttttttttttttttgtttttttgggtggttgtatgttgggttggttgggtaatggagagggagttgttaggaatgtggttttggggattgttttgtttggggaaggggagagggtggttatggtgttaggagaggtgtgggagttgagaggtggtgtgggggtgttattgttgttgtaggttggagagagattgtttttagtgaggtgtgtattgtttgggtgagggttttatttttttgtggtgtttttggaggtgggaaagttgggtgggtatgtgtgtagagaaaggggaggtggggaggttagttatttttggagttggttttgattttaatagattgtttagtgtttggggatgttgattttggggtgttgtggtgtttggttttatgtgtgtgtggggttgaggggttgggggtgtttttggttgtttagttttaataaagggtgtttttttttattttgtgaggaggggtagttttggagatttggtttttagtgagtggggttttagtgttggggaggtttatttttttttggggttgttattttattattattattgttttttttttttttttaaaaggattggagattgatgtatgagggggttatggaggtgtaggagtggtggtgatggtttgggaagtggagttgaagtgttttgggttttggtgaggtgtgatagtttattatgattgtgtttaggtaggaaaatgtggatgattattatgatattggtgaggaatttggtaggtaaagggggtattagaagtgtatttttttggattgtggaaatgtataatgatggggttattgggtggtaaataaatgtagtttgaattaggtgttttttttgttttttttggagatgtgtaaattatagagaaaagagttattaatttagtggtaaattgtttgatttaagggtttgggggtggaggagaggtagtagtttagggttagattatgatgtatagtatattgatttagttttttggataaaattagatttaattgtttgtgttaatttttgttagtttttgtttttttgtgataataggataaatattaagattataattgtaattggagttagtttttatgtgtgatttaaatggagggtataaattaattaataggttttaaaaattttagtattttattttttatttaaatttttagtgtaatttgagtaagtattggtaggtggtaaatggagatttgttagatgttgatattgggtttggattttgaaattttttttaattaggaatttaattatttggttggtgttggtggttgttttggttttatttataatgttaaatttttaataaattaatgagagtttaatatggttatttggatttagagtatatttttattgttgtagtagttgtgatttttagtgtaaaattttttagtttttaggtaaataaagaatagttttttttggggtatttaagggttgattgttgttttttttgattgtgtattagatagagtgttttgggttttggttaattttagtagaaaatttagtttttatatatatatttaaaattgaatttatggaatttgattgtggtgtatttatattgtgagtggagtaggtaaaaggatttttaaataaataaaatatgtatttatttatatgtgtattgaaatatgtatttttttatatatatttgatgttttgatataaagttttttttttttttatgaaaaggaaattaaaaaatatttatattttggattgtttaatgagaattatggaaattaagtttaattaaatttttttaaaaatttaaatgatagtgtagaatttttttaaaagttattgtaatagagtatttttttaaatatttagtattgattgaaaatatagatgggggtttgtgtttaggaagagttttttgtatattgatgatttggtgagtaaataaggaaagttttttaaatattatattttatggatatgtttaagattaaagtttaagagtgtgtgggtgaaatatttggtttaattggaattaaataattttattgtggtttttagtaagatgagtggtatttggagtttttttttgggattggaagaaaaaagtaaaaaaataaattttaatttgatttgtatagtgtggtttgattgtttaagtgttgttagaaagagagatgattaaaattagttgagattattatattatggattaagtatattgattttatttttattatgattttttggtattattatgtgttatgagaaagaaatagaaaaagaggtttttttgtggttggtgaagggagtttttgatttttattttgtgggtgtgatgatgaggggagggaggtggtttatttatttgttattagtattttgatttgtttagtgtatatttttgtgtataatgttttttttattgtgtaaggtaaattgataaattgtttattaaataatttgtgtgatttaggaattttaaagaaatgttttgaaaaattggaagtttgaagtttttaaaaatgaaatgtatagatttatttattttgtataattgttattgtttttgttaaaaaatgagtgaatgattgttttttggaaaattttttaagttttgattttatgtttgttttggatgtagttattttttgaaaataagttttaatgtaaaatggatatgtaggaagatgttgtttatatgatattatgtgttattgagggaagattgggagtggaggtaggagtttggtggtaggaaaatggaaatgggtagatatgtggtataaatg

SEQ ID NO: 753 - DNA, 6186 bp, Artificial Sequence
  chemically treated genomic DNA (Homo sapiens)
tatttgtgttatatatttgtttatttttatttttttgttattaaatttttgtttttatttttaatttttttttagtgatatgtgatgttatataagtagtatttttttatatgtttattttatattaggatttgtttttaggaagtggttatatttaaggtagatataaaattaggatttgaaaaattttttaaaaaataattatttatttattttttggtaaaaataatagtagttatataagatagatgagtttgtatattttatttttaaaaattttagatttttagttttttagagtatttttttaaaatttttaggttatataaattatttaataaataatttgttaatttgttttgtatagtggggagaatgttatatataaaaatgtatattgagtaaattaaagtgttagtgataaataagtaagttatttttttttttttattattatgtttatgaaataaagattaaaaattttttttgttaattatagggaggtttttttttttattttttttttataatatataatggtattaaaaaattataatgaaaataaggttaatatatttaatttataatataataattttaattaattttagttatttttttttttaataatatttaaatgattaggttatattatgtaaattaaattaaaatttatttttttgttttttttttttagttttaaaggaaaattttaaatattatttattttgttgaaaattatagtaaagttatttaattttagttaaattaaatattttatttatatatttttaaattttaattttaaatatatttatgaaatgtgatgtttgaagagttttttttatttatttattagattattaatatatagagagttttttttaagtataggtttttatttatgtttttagttgatattaaatatttagagaaatattttgttatagtaatttttaaaaaaattttatattattatttgaatttttaaaaaaatttagttaagtttagtttttataatttttattaggtaatttaggatgtgggtgttttttaattttttttttatggagaaaaaggaagttttgtattaggatattagatgtatatgggaaaatatatattttaatgtatatataagtaaatatatattttgtttgtttaaagatttttttgtttattttatttataatgtaaatatattatagttaaattttataaatttagttttaaatgtatgtatgaaaattaggttttttattaaagttgattagagtttaaaatattttgtttaatatatagttaaaggaaatagtaattagtttttagatgttttgaaagaaattattttttgtttatttagaaattgaaagattttatattgagaattatagttgttatagtaatggaggtatgttttgaatttagatagttatattagatttttattgatttgttaaaaatttaatattgtaaatgaaattaaagtaattattaatattaattaggtaattaaatttttggttggaagaagttttaaaatttaagtttaatgttaatatttggtaagtttttatttattatttattaatatttgtttaaattatattgaaaatttagatagagggtaaagtattaagatttttaaaatttattaattagtttgtattttttgtttaaattatatataaaagttaattttaattgtaattataattttagtgtttgttttgttgttatagaagggtaagggttgataagagttagtatggataattaaatttgattttgtttaggggattggattaatatattgtgtattataatttagttttgaattgttgttttttttttatttttaggtttttggattaggtggtttattgttgggttagtaatttttttttttatgatttgtgtatttttagaaagggtgagggagatgtttgatttaaattgtatttgtttattatttaatggttttattgttatgtatttttataatttaggagggtatgtttttggtattttttttatttgttaagttttttgttggtgttgtagtaattatttatgtttttttgtttgaatatggttatgataaattgttatgttttattaaagtttagggtattttagttttgttttttagattattattattgtttttgtgtttttgtagtttttttatgtattagtttttagtttttttgaagaaaaaaaaaaggtaataataatagtaaaatggtaattttaaaaggaagtagatttttttggtgttaagattttgtttgttgaagattgggtttttggagttgtttttttttgtggggtggagaggagtattttttgttaaagttgggtggttagggatgtttttgattttttagttttgtgtgtgtgtggggttgggtattatggtattttgaggttggtgtttttaaatgttgggtggtttgttgggattagaattggttttggaagtgattggtttttttgttttttttttttttgtatatatgtttatttagtttttttatttttagggatgttgtggaagaatgaagtttttgtttagatggtatgtgttttattgggagtaatttttttttagtttgtggtaatggtggtatttttgtgttattttttggtttttgtgttttttttaatattgtggttattttttttttttttttgagtgaggtagtttttagagttatatttttggtgattttttttttgttatttggttgatttggtgtgtggttgtttgggggagtaagggagggaagggagtggtttattgaggtgtagtagtttgttttagatttttgtgttttgatataaagtgtttggttgggttggtgttatttgtttttatttggtttgtggggttggggaagttttttggttgtgattgtatttttttttgaagttaagtttttttttgttttggtttttttagttgtttgaggtattgtttggataaattttattgtgttttggttgggaaagtaaaagttggtgttgggggttggggggattggggagttgtgtttggttatttatttgggtgtttgggagtttttttggtttttttggagtgttgttggaggttgattataggtgttagtgttggagattagttggggtggtggtgggaatatagttagggagtgagtggggggtgtagattttttttaggtgttggttttagattttgttgttgtgagttgttgagttttttttgtggagggaataaagtttttggtgttggtttggtttggttgttttttttatattttgaagtagttttttggttttttgttgttttttgggtggagggtggttggtaggtggttaatggggattttgtaagtgggttggtggtgtggtttatttatttttgagttgttttgttaggttggtgttgtgggttttgtgtggtgtttgttgttttttttagttttgtgttttgggtttgttggtgtgttttattgtgtatattttgtatatatttatttgttttatatttatgttggttggggagttagtgtgtttgtttggaatgtgggtgttttatttgtgatatattgttaagttgttttttgattgggttttagggaaatatggtttttttgttttgagatgtgtattgggattttagtttgtgttgggtatggtgtttggtatgggaaaattatatagaataaaatagatttttttaaatttttgttttttggaaatttgtattttggtgggatagatagataataaatatgtaagttaattaataaggtaattttggaggattagttttatgtttattatgaaataggttaatggaatagagaatggtaggaagggagtgtattttattagattgggtttttttgttggattggtgttggagttgaggtttgaaggtaagaaggtttgtaatttgaagaaagggttgaggtttttgagatttaaagaagtaatagagatgtagagtttatttgtgttattttatatgttattggttattgttgagttgaaatgtagttagttttaaattaattgtgttgtaagtgtaaaatatatattagagtttaagatagtatggatatgagaatgaaaaatattttatgaatatttttatatttattatatttttaaatgatagtattttggatatgttgggttaaataaaatatattattaaaattaattttatttgtttatttttttttttttgagatggagttttattttgttgttaggttggagtgtagtggagtgtggtaatttttatttttagggtttaagtgatttttttgttttggtttttttagtagttaggattatagttgtgtgttattatgtttagttaatttttgtatttttagtagagatggggttttattgtgttgattaggatggtttttattttttgattttgtgatttgtttgtttgggttttttaaagtgttgggattataggtgtgagttattgtgtttggttttatttgtttattttttaaaaggtggttattagaaaatataatagtatttatgttgtttgtatgagatttttgaggattgtgttggtttatataaagattttatatttattggagatttttatttattttttttattttttattttttgtttttatttaatgtttgggtggagatgaagaagggttgattttttatattttattgttggagaattttaaatggtgaaaagtttttaaagggaaatttattttattgtttagaatgatgaaaattgatagatgaagagatttttgatttatattgttgtttaaatttttaggttttttaaattgagttggtttaaatttttgtggtttaatagaaatttttaattgtgaagattttggttttttgaaaataaggtaaaataaaataaaagaatattttttaggttttatgttaaattttagttttttttttttttttgagatgggtttttgtttttgtggtttagattggagtgtagttgtgaaattttggtttattgtaaattttgtttttgttttttgggtttaagtgatttttttgttttaggttatttagtagttgggattataggtatgtgattatgtttggttaattttgtatttttagtagagatgtggttttattatgttggttaggttggttttgaatttttgattttaggtgatttttttggtttggttttttatagtgttgggattataggtgtgagttattgtgtttagttaaattttagttttaaataatattgtattaatgatttataggaagggtatataggaattaaggggaagtttttaaattgggagatggtattagtttaagtagtgggtttgataatataaaagggttttgagaggtgagaaatatagttaaaaataataataataataaaaaaagagtgatttatttgggaaaatgtaaatgaatatatttgttgggagaaaaaatttaaaatatagatgtttgggataaatttggaaggtgtttatggatgattgttatatgggtaatatttattttttgtaaaataaaaaatatattgtttgaggtaattaaaaggattgaatttatttggtagttagaatgttttaattattttaatggataatgatgtttattggagattatttggagtagtgaaaaagagtatgaaatttggagttataaaattagatttagtattggtggaattatttaatagtttaataattttggatgagttattaatttttgagttttttgtgtatattaatttagataagtattttagaaaggggaaatgtggttatttaaaaatatatttataaattttttgatatttttttaattaagaggtggagtttaattttttttttaataaatatttattaattttatttgtttgtttttaagaaaaggtagtggtagtggtatagtgtaatttatttttaaggttaggttataaggtattagagtttttgtttgtttgtttttttttttttttttttttttttttttttttttttttttttttttttttttttttatttattttaaagtttttagttgttatgattattttagggttgttatgtagagatatgtgataaaattatagaaagaatgagagatgtttagagaagttagttgtttagttttatttttattttta

SEQ ID NO: 754 - DNA, 6203 bp, Artificial Sequence
  chemically treated genomic DNA (Homo sapiens)
taaatgtataatgataatttgaatatttatataagtgattaaaataaaaatgattagaagtattaaaaattattggaaagattggtatttaggtttttttgtggtggtatgtggtggttgggaagaagttagagaattgttaattagttgataagtgttgtattgggtattgttttattttgatttttagttttaattattttttttttaaagtattttattttatttttattggaataattttttttttgtatatatatatttatgtttttaaatttaataattaattgtgtaatatttaattaaattttataaggaatattgtaataggtggaattaagtttgggaataagtataatggatttttatgggatttataatttatttagtgggaatagaagtatgtaggtgtatattagttgttggtttgagtatttattgtgttgtattatttttttgtatgttgtatattatatagtaatggttggtatttgttattggatgagttagttaaatggaggttggttaagagattttttattataatgttatttatagtgtttttgtagggaattaattattttattgatgataggattttttgatttagaatatttgaaaatatttgggaagtatgttgtttggaaagaatatgtagaaattaaattttagttttagtatttttgtaagtattttataataaatatttgtaagtttgaaagaatattagtttttattttatttttaaggttatattatttttttatgtttatttgaggtatagattttataaatagttatgaatatgtgaatatatttatatattgatggatttggaattttattagttagtttgataaatatttattaataaaaatatttgtagattggaatattttgtttatttatttttgtagaaatgaaaaataataaataatatttttagagaagaaaaatttttgtatatgtatagtaggtgtttattaaatatatgatgaatgatgtataggttgaaatattttttttaatgtatattatgtttgtttattttaatatttgtgatatttatgtatagtgaggaaatgtttagtgttaaagtggatttttaatgtgaatatgttgtaggaattgaagtgtgatgtaggtagtttttagaagtattatgtggaggtagtgatttgtaatgtattggtattaaggttattgaaatggttatgaaattgttatgaaattgtatgtgtgaaattattgtaaggtttatgttttagtgaggatggaaatgaagagtttggaaataggaattggagtttttagtttagaaataattttggaagaaatataagttttttgaatgttattaaataaattatattaagagaatttagagtttatagtatttgatatttgatatttatttttttgtagtaatatagtaggattgaagagtattaaaattagttagagttttaattatgtattagatttagaaatttttattaatatatggtagagggagaatattttttttagttaagtatgttttttgattttttttttaagaaattagtgtgtttatatgtagatgtataatgataatttgaatatttatgtaaataaagaaaaaaatgatttaaagtaataaaaattgtgggaaaatattaatatttaggtttttttatggtaatatgtggtggatggaggaagtgagagaattgtagttagtttatagtgttgtgttgggtagttttttttttttgatttttagttttaattattgtataaatagttaaaaattagttttgttggaattttttttttattttgttattttggttaaagttttttatttattttttttatttataggtatttgaatatgtgtgtgtaaatgtaaaagtttttagattaaaataggaataaggaaagtttatttgttttagtttaggatttggtgggtgtggtaatttaggaagatttgagaaataattattgtttggtttgaatgatatatttgattgttattaaaatagtatataattatagtttaaatgtagatttaatttttaatagatttatttgaatttttaaaatttgtattgttgggtgtaatgatttaaaattattttatgggagatgttatagtagtttttaaattattgagttaatatgaaatttggattttttaaaatttttttgatttaatttggttatgtagttaatattgtatttgggaaaggggtttttattttatttagtttttagaagttaatggaattattttgtaaatagtttaggtttttgtttaaatatgtgaagattgataagattatttttgtgagaatttgtatttttttattttaattttttttttttttaattatgttttataaagtaaatttatagatgttttttttgggttttgggagattttttattttaaataaattagttggaggaaaggaaaggaaggaagaaataaatgtaatatagaagttttttttagttgataaaaggttaaaaattattaatgtgtaaatgttgttttttttattttaaagtatttttttatgtagagtttagggattaggaggatttataatgtagtgatgggtagttaggttttgtaggagtggggatagagggaatttggttggtggtttgattttgtagggaagaaggatgtgtggtgagaagtattggatttggggagggttgggatttggttgagggtgatattattgagtattttttggtatagtgttggttttttttttaaatgtgttatatgtggttttgtatgggattgttttttttaaagatagttaaggaaaaattaaagattgatggggatatttgttttttttttttgttttaatggttttttagaggttgtggggatttggtgagggtagggggtagttgttttaaattagtagttttaggatgtaaggtattatagaaaattttgaagttttgttatttgtagtatagggataggggtgggataatagagaaggaatgttttttttttaaaagaaaatataaataaaattttatttttttggtttgtggtagtttgtttgttgaatgttgatttgtttttgttttgtagtaggtgatggttttgggtgttatttgtgtgttggtgggaggttggtttatgtttgggttttttgatgtttattgtaaagggtagtgggaatgatagattgtaaatttttttgtttgtgttttttttaagtattagaaatttaagttggaattaatttttttttttggaaggtgtaattttttttttgtgagttttgtggtgttgggttgagattgttgagaggaagtggtgtagtgttgttgttaaggttttttttgttgttggtgtggttgggattatttggtggtgtggtgtgtgtagtgtgtagagttttgggagtttatgtttttgtttttgtttttgttttttttgttttttagtttattttgtttgtttgtttttttgtttggtggagagtatagtttatttttttttatttgtggttgttgggttgttttttatttatatttttgttgtaggttggatttagtgtgtttgtttgttggttagtttaggttaggtgtttggtgggttgtgtttatgtagttggtgtaggaggttttatgttggtggtgtagtgtttgttttttgtgttttttttgtttttttttttttttgtaggggttgagtgaatgtagtttgtgagagaaaatggtggtggtggtggggaattgtgttttgttgttgggatttttgggtgttagggttatgagttttgaggtaggtggtggtggaggagtttttaaggtgagtagtgtgtttgtggttgttgtgggattgttgtgggaggtgggtagtgggggttgtgagtgggtggattggtggtggtggtagttgtgtaaagtgtggagtgtggagttggattagttgtttgagtagttgtttttttttgttgttttattgttggtttttttgatttttttgttgttggagtttgtggatgtagtggggagtgggattggtttttagtttgtggtggtgttgttgttttatggagttgtgagttgtggtggtgtttattttattgagttggtggtggtgttggatagtggtgttttgagttttgtagtggttgagtttggggagaagtgggtgtttgttgttgagttgttttttgtagtggtttttgttgggtgagtagtatggttggggttgtggtggggatttggagagtgggtagagggtaatgaatgaattttgggtattatgtatggtgttttggggtttagtgtagtgaggttatgtgttgtttgttgggatttatgtttttgagtattttttgatttttttggagttgggtggtgttttggatttagtttgggggattggatggggatgtgtggaagagtttgttattgtttgtagatatgtgataggtgtgtgagtttttttgtggggaattgttgtgaaaaggtgtagggggttatggttggttttgtgggatttttggaattggggttttttgaggagtttgggggtggggtatggttttgtggtggtgtttttggatgggtgtttttggggtaaaggtattggggggtgaggtttgagtttgaggtgggtggtggttggaagaggggtggggtgggtgagaagtttgaggttgggtgggagattgagaggattgaagagaaagtagtaggttttagtggttgtgataggtagagttttttggtttgtttgggatttgagtttttaggtagatattgtgggttgggtttggatgtaggtggtgtgtttttagtgttggttgtagggttttaggaggatggtttggtaatgtttgttaaagttgtgtggtgggaggttgtatatttgtggaggtttgtagttttttaggaagtgtggtttgtttaattgtagtttttaaggggttttgagtgtttttgggaatgtgaattgtattgttaagttatttgagtgatttttgtttggagtttgaatttggtttttgaagtttgtatttggtggagtggtgtaagagttaggattggatgtgttagttatttagttttaaagtagtggtgattgttttttgtagtttttttggtttggtttggggattgtggtgtgggtgtagtgttttttgtttggtgttttggtgtgggttgtttgttgaattttaggggttgtagtgtggtgggttttggtttagatgtgttttttggtgtatatgaagtatagtatgtgtaaggtaatttagattagtggtttattggttttgtttatttttggttattggaaatttttatgttaaaggaaatttttttaagtgtgatagttatatttttgtttgtttgttttttaaaaatttgattaatgtatgtaaagtataaagttttgatgggtattttgagttgttggaaatgtttttgtgatagttttttgtggttttgtagaattttttgatttttattatgagaagaaagtgtgttattttgtgagatgaatttgatagtaggagtttttggtttggatttattatttaaagtgatttggtattttttgtgtatttgattatttgtttaaaattatgatttatttagtatttggaagttttttttttttttttaagaattaaaaaatatgttttgtattgtattatggtattattgagattaaaggagatttgtgattgatatagttttgtgtgtatttgtatatgtaatttatttttataagagttatgtatttttatagtttttttatttttgtgtagattgtattaaaatttaattggaataattttttgaaggtaatttttattttaaatgaattttagataaaaatttttaattttaaatttaagaaattgtatttattgagatttaattttttggatataataaataatttagtaaatgttagtattttagtatttttaatgagttgtgaatatagtagaagagtatttattgtaaaaataatgtattgaaattgtttaatgttgttttttgatataaaataagaggattaaggtggaggtagatagaatttagggattaagtaatttatgtttagtatttgtgttttgtaattgaggtttttttttttttgtttaaggtgtagattataattgtatagtataagaaaataatgggtttgtaaggat

SEQ ID NO: 755 - DNA, 6203 bp, Artificial Sequence
  chemically treated genomic DNA (Homo sapiens)
atttttataagtttattatttttttatattgtgtaattataatttatattttaagtaaaggggaaaaaattttggttataaaatgtaaatattaagtatggattatttagtttttaaattttatttgtttttattttagtttttttattttgtgttaagagataatattaaataattttagtatattatttttatagtggatgtttttttattatatttatagtttattaagagtattagaatgttgatgtttgttaaattatttattgtatttaaaaagttaggttttaatagatataattttttaaatttggggttaaaaatttttatttggaatttatttaaagtagaagttgtttttaaagaattattttagttaagttttaatataatttgtatagaaatgggaaaattatagaggtatataatttttgtaagaataaattatatgtataagtgtatataaaattgtattagttataaattttttttggttttagtagtgttatggtatagtgtgaagtatattttttagtttttggggagaggaaggggatttttaaatattaaatggattgtgattttaagtaaataattaaatgtataaaaaatgttagattattttagataatgaatttaaattaaggatttttattgttaaatttgttttataaaatgatatgttttttttttataataaaggttagggaattttatagggttatgagggattattataaaaatatttttagtaatttaaaatatttattaagattttgtattttgtatatgttaattaggtttttaaaaaataaataaataaggatgtagttgttatatttaaaagaattttttttaatataaaaatttttagtagttaaaaatgggtgaggttaataaattgttggtttaaattattttatatatattgtattttatatgtattagaagatgtatttgagttgaagtttattgtattgtggtttttggaatttagtgggtggtttgtgttagggtattgagtaggaagtattgtatttgtgttgtagtttttgggttaagttggaggggttgtggggagtagttattattgttttgaaattgaatggttgatatatttggttttggtttttatattattttgttaaatgtaaattttaaaggttaaatttaaattttaaatagaagttatttaagtgatttagtagtgtagtttgtatttttaggaatatttaaagttttttgggggttgtaattagataaattgtattttttaaaagattgtaagtttttgtgagtgtgtagttttttgttgtatggttttgataggtgttattgagttgtttttttggagttttgtggttggtgttgggggtgtgttgtttgtgtttgggtttagtttgtggtatttgtttagggatttgagttttgggtgggttgaggggttttgtttgttatggttgttgggatttgttattttttttttggtttttttagttttttatttgattttgggttttttatttattttgttttttttttgattattgtttgttttaggtttgggttttgttttttagtgtttttgttttggggatatttgtttgggggtgttgttgtagggttgtgttttgtttttgggttttttggagagttttgattttaggagttttataaagttagttgtggttttttatatttttttgtaatggttttttgtagagaggtttgtatgtttgttatatgtttgtaaataataataaatttttttgtatgtttttgtttggttttttaggttgggtttggggtgttgtttgattttgaaggggttggggggtgtttaggggtgtaggttttggtgagtggtgtgtagttttgttgtgttgaattttgggatgttgtgtatggtgtttggggtttatttattgttttttgtttgttttttaagtttttgttgtgattttggttgtgttgtttatttggtgggggttgttgtaggagatggtttggtggtgggtgtttgtttttttttgggtttggttgttgtgggatttgaggtgttgttgtttggtgttgttattgatttggtaaggtgggtgttgttgtggtttgtggttttgtggggtggtggtattgttataggttggaagttggttttattttttgttgtgtttgtgggttttggtgatggggaagttgaggaggttggtggtgaggtggtaaggaagagtggttgtttaggtagttggtttagttttatattttgtattttgtgtagttgttgttgttgttagtttgtttgtttgtggtttttgttgtttgttttttgtagtagttttgtggtagttgtgggtgtgttgtttgttttgagggtttttttgttgttgtttgttttagggtttgtagttttggtgtttgggaattttgatgatgaggtgtgattttttgttgttgttgttatttttttttgtgggttatatttgtttggtttttgtgagggagggagggggtggggagagtgtagggggtgggtattgtgttgttagtgtaaggttttttgtgttaattgtgtgagtgtggtttgttgggtgtttggtttggattgattgatgggtgggtgtattgggtttggtttgtggtagaggtgtgggtggagggtggtttggtggttgtaggtgggagggagtgggttgtgttttttgttgggtgagagggtgggtgggtgaggtggattgggaggtggagggggtgggggtggaggtggaggtgtgggtttttgggattttgtgtgttgtatgtgttgtgttgttaggtagttttggttgtattggtgataggaggagttttggtggtagtgttgtgttgtttttttttggtaattttggtttggtattgtggagtttgtgggaggggagttgtattttttgaaagaaagaattagttttaatttgggtttttggtgtttgaaggggatgtaggtgagagggtttatagtttgttatttttattgttttttgtagtgggtgttgggggatttgggtgtggattagttttttattgatgtgtaggtggtgtttgggattgttgtttgttgtaaagtgaaagtaagttaatgtttagtagataggttgttgtggattagaaaaataaagttttgtttgtgtttttttttgaaaagaaaatattttttttttattgttttatttttgtttttgtgttatagataataaaattttaaagttttttgtaatattttatattttgaagttgttgatttgggataattattttttatttttattaagtttttatagtttttgagaaattgttggggtgaggaagggaggtgggtgtttttgttgatttttagtttttttttggttgtttttgggaaaggtagttttgtatagaattatatatagtgtgtttggggaggggattagtgttgtgttaggaagtgtttggtaatgttatttttggttaggttttggttttttttgaatttgatgttttttgttgtatgttttttttttttgtagggttgggttattggttgggttttttttgtttttatttttgtagggtttggttgtttattgttgtgttgtgagtttttttagtttttggattttatgtgagaaggtgttttgggatggaaaaagtaatatttatatgttaatgatttttgattttttgttaattgaggagaatttttgtgttgtgtttatttttttttttttttttttttttttagttggtttgtttaggatggggaattttttaaaatttaggaggaatgtttatagatttattttgtgaaatatgattaaggaggggggaggttggggtgggggggtgtggatttttatggagatagttttgttagtttttatatatttagataaaagtttgaattatttatagaataattttattgatttttggagattaggtaaaatgaaagttttttttttagatataatgttaattgtgtaattaggttagattagaggggttttaaaaagtttagattttatattagtttaatgatttgaaaattgttgtaatattttttataagatagttttagattgttatatttaatggtataaattttgaaagtttagataaatttgttaaaaattaagtttatatttaggttataattatatgttattttaatggtagttaaatgtattatttaaattaaatagtggttattttttaggtttttttgggttgttatatttattaaattttaaattgaaatggataaattttttttgtttttattttgatttaaagatttttatatttgtatgtatatatttaggtatttgtaagtgagaaaagtaagtggaagattttagttagagtagtagagtaaaaaggagattttagtaaaattgatttttgattgtttgtatagtggttgaaattggggattaaagggagagggttatttagtgtagtattatgaattagttataatttttttattttttttatttattatgtattattatggagaaatttaagtgttggtatttttttatagtttttgttgttttgagttatttttttttttgtttatgtaaatatttaggttgttattatgtatttgtatatggatatattgattttttaaagagagaattaaaggatatgtttaattgaaaagggtgttttttttttgttatatgttaatagaagtttttgagtttaatgtgtgattaagattttagttggttttggtgttttttagttttgttatgttattgtagagaggtggatgttaaatattaagtattgtaggttttgaatttttttaatatgatttatttaataatatttaggagatttgtattttttttaaggttgtttttagattgaaagttttaatttttgtttttaagttttttatttttatttttattgggatgtaaattttgtaatgattttatgtatgtaattttatggtaattttatgattattttaataattttaatattagtgtattatagattattgtttttatatagtgtttttggaaattgtttatattatattttagtttttgtagtatatttatgttgaggatttattttgatattgggtatttttttattgtatataaatattataaatattagaatgagtagatataatatatattgggagaaatattttagtttgtatattatttattatatatttagtaagtatttattgtgtatatgtaggaattttttttttttgaggatattgtttgttgttttttatttttataaaaatgaataaataaaatattttaatttatagatatttttattagtgggtatttattaggttgattggtagaattttagatttattagtatgtgaatgtatttatatatttatggttgtttgtgagatttatattttagataaatataaaagaataatataattttgagaatagggtaaaagttggtgtttttttaagtttataaatatttattatggaatatttgtaggagtgttggggttagaatttggtttttgtatgttttttttagataatatattttttaggtgtttttagatgttttaagttagaaaattttgttattagtgggataattggttttttataagggtattgtaaatgatattatagtagaaggttttttaattagtttttatttagttgatttatttagtaatagatattagttattattgtgtggtgtataatatgtagagggatgatatagtataataaatgtttaggttagtggttggtgtgtatttgtatatttttgtttttattaggtgagttatgggttttatgagaatttattgtgtttgtttttaaatttgattttatttattataatgttttttgtgaaatttaattaaatattatataattgattattaaatttaaaaatatgagtatgtgtgtgtgaaaagaaagttgttttagtgaaaatgaagtgaaatgttttgagagaaaagtgattgaaattggggattaaagtgaggtagtatttagtgtaatatttattaattagttaataattttttaatttttttttagttattgtatattattatggggaaatttaagtgttagtttttttaatagtttttgatgtttttagttatttttattttaattatttatgtgaatatttaggttgttattatgtatttg

SEQ ID NO: 756 - DNA, 6203 bp, Artificial Sequence
  chemically treated genomic DNA (Homo sapiens)
aattgaggtttatagagtttaaattatttggttaaggttataaatagttataagaattatatttaggtagtttgattttaaagatattagtttattttgtattttatagataaataatatatatttatttttttgttgttgttttgttttgagatggagttttgttttgttatttaggttggagtgtagtggtgttattttggtttattgtaagttttgttttttgggtttaagtgatttttttgttttagttttttgagtagttgggattataggtatgtgttattatgtttggttaattttttgtatttttagtagagatagggtttttttgggttagttagaatggttttgattttttgattttgtgatttatttattttagttttttaaagtgttgagatgataggtgtgagttattgtgtttgatttatatttattatttataaattggagagaataagaaaattaaaagggttaggtgtagtgatttatatttgtaattttagtattttgggaagttaaggtaggaggattgtttgaatttagaagtttgagattagtttgggtaatatggtgagattttgtttttataaaaaaatataaaaattagttgggtgttgtggtgagtattttatttttaggaagttgaggtaggaggattatttgaggttaaggaggttgagattgtagtgagttgtgattatattattgtattttagtttggatattagagtaagattttatttttaaaaaggaaattgagaagaaagaaaattaaagggaagtaaaattatttatttttattattttaagatattttttagaagttggtattttagtgtggtttttattgttttttgtgttagttttttgatttgagtaaaatttttgggatgttaaatttaaaattttttttatttttttggaaattttgtagtattagtttagatatgtttttatttttttttgtggtaaagagaaggattttgtttttggtttttagagttttggtttaagtttttttttaggagggaagatgagtgtttagatatttagagtagttgggggagatataggtttgtgaaattattttggtttaattattaggttggtagaattttagtgaagggagttttatttttgagttttatttaagttttggttatgggtggggtagataagtaggaatttatttttataggtttaatgttaatatttttaggtgaaatttttgatgaaatttgaggttagggttttggtaagtagggaaagaatgttggtaatagaggtttttatttttgaggattttgttaggggttagagatggggtaatggttaaaaggaaggaataggttaggtatagtggtttatgtttataattttagtattttgggaggttgaggtaggaggattgtttgagtttaggagtttgagatttgtttgggtaatgtagtgagatttgttttttatttaaaaaaaaaaaaaaggaaagaataagtaaatttttgagaaataggttgggggaggtattatgtagttggaattgttgttttataaaatagaatggtatgtgttattgttattttttttttttagttttttttttttttaggttgttagtgttttttttgggggattaaattggattgttttttagttttagatagagagtagtttgagttaggtaggaaagtgggatagttggggagttggattttattttttgtgagttttgttggtatttgatggtatgtggtttggagagggtaggtgatttggtgtggagggttagagggtaaatttttaaataagtggtaataggttattaatttgaaagggaaaattgtgtagtgatgggaaatgtgtttaataaatttattgggtgattaattataaaggttgggttggagttttagaggttgtttgttaaatattttattaagtggtattttgaaagttgttatttgtgtattttgggagtttagaggggattttgagggggaatgaggtttggaggatggaattatttttaggtagattgagaaggagtttggattttatttttaaatatagtttggagtttataggttagaggttttaatgggagaaaagttaaaggaagagggtgtagaaaggagttttagggaattggtggttatgtgattttgagtaaattttatttttttttgagatttagtgtttttatttttatggttttgtgtgtgttatagagatatggtggggattaaatttgattgtgaatatgaaagtgtttgggaaattttatggttttatttaaatatgagttatttttatttgaattaaggggggaagttatttggtaggattaggaattttatttttttgaatttttatgggttttgttgaggttgaagtagttaggggttaaagttgtttttagtttttggaagggtattgtgaaagtggatttgatttgagaagttgttttttgatgtgggtagttatgtgatgttagttttgaataagagggggtagtttggagtttggaaaggtgttagtgtaggtggggtttatgtttagattttttttgttgattgttttgatgatttatttttatattttagtttttttatttttattgtagagttggaaagggtgtggggaagagaggagagggaggtaggttttgggttttggttttgttttttgtttttttttatttttttttgggtttggttatttagttaaaaggtaggttaagagtaggagagatatagagtttggtattggttttaggtagtagttagtttgttgtttgtttgtgtgtttttagagttatggagagagttagtttgatttagaaggttaagttggtagagtaggttgaatgttatgaggatatggtagtttttatgaaaggtgttgtggagaagggtgaggagtttttttgtgaagagtgaaatttgtttttagtagtttataagaatgtggtgggtggttagagggttgtttggagggtgttgtttagtattgagtagaaaagtaatgaggagggtttggaggagaaggggtttgaggtgtgtgagtattgggagaaggtggagattgagttttagggtgtgtgtgatattgtgttgggtttgttggatagttattttattaaggaggttggggatgttgagagttgggttttttatttgaagatgaagggtgattattattgttatttggttgaggtggttattggtgatgataagaagtgtattattgatttagtttggttagtttattaggaggttatggatattagtaagaaggagatgttgtttattaattttatttgtttgggtttggttttgaatttttttgttttttattatgagattgttaatagttttgaggaggttatttttttggttaagattatttttgatgaggttatggttgatttgtatatttttagtgaggatttttataaagatagtatttttattatgtagttgttgtgagataatttgatattgtggatggttgataatgttggggaagaggggggtgaggttttttaggagttttagagttgagtgttgtttgttattgttttgttttgttttttttagttttttattttgttgagaggattagtatggggtgggaggttttattttttttttttaggtgttgtttttgttttaaagggttttgtggagagggattggtagagttgaggttatttggggttggggattttattttttttgtagttgttgagtgtatttaattattggttatgtttttatttttgttttttgtatttgtttttttttgattttaggattaggttattttttttttttttttgttttttttttgtttttgttgtttttgattgtaggaattgaggagtgttttgttttgtggttgagaattggatagtggtaggggttggagatgggtgtgtgtgtgtgtgtgtgtgtgtgtgtgtgtgtgtgtgtgtgttagtgtaagattgagattgagggaaagtatgtttgttgggtgtgattatgtttttttttaataaagtttttttgtgatattttttttgttttttttttagtttttggtgatgggttgggagtgggattggaatttgatttagagattttgattttggatttttgagttagggttttgaattttttaggtggtttagtggtttgtatgtaagattttgagtttaggtgaggttggggtttggttttttttattatggtggttttagttaaattggatgggattgggagggttgggtgaatttataggaggtgttgtggtttttttgttgggttgaggggaggtgagtgggagttatggtgtgggaggttgatgagttttggtggagtggggtaggaaatagtgaagtttttggtgtgagatttaaggatagtgttgtagtagtgagtggtattgagtatttgatttgtaggtgggttatagttttattaagggtttagattttagtggaggggagtatgatttgaggaaggggtatagtgttgttaaaaaagtttagattttaggagagggttatgttttatagagtttggagatggagataaaaggaaatgggttgaaggggaggaaggatgagttgggtgggaagggttgttgggagttgtgtttattgagtttgttgtttgagttttttgtagttagtaatatgttggaatttgtagttgttttgttttgttttgtttttgtagttttggattggaggtggggtttgaggttaatattgtttaattataggagggagttgttttagggtattgttttgggggtttgattggttaatgggaaagtgagtggtggaatgtgtgtggtgagttttttgttgtttgttaggtttggtggatattatgatttgttgattgattgagaggtgtttttgttgtttgttgagtgttgaggggtggagtttttttggttttatttagataagttgttgtttgtttggtttgagagttgggaattttttagagtagtgggatgagttaggattgtaaaatgtagtgtttgtttgttgagttattagtttatttggttgggtttgggttgggttggttgtgggggttggttggaaaaaggttgttaagatgtttttattatattttgaaatttaagtagttttggatttgttgttgagaggtttggattgtgtttttggttggttgtgtgattttggaaaagttgttatatttttttgggttttagttttttttttgtattataaggggtttggattaaaggttaatataagagtgaaaatggtggttttggttgggtgtggtggtttatgtttgtaattttagtattttgggaggttgaggtgggtgtattatgaggttaggagattgaggttattttggttattataatgaaattttgtttttattaaaaatataaaaaattagttgggagtgatggtgggtatttgtagtattagttatttgggaggttgaggtaggagaatggtatgagtttaggaggtggagtttgtagtgagttgagattatgttattgtattttagtttgggtgatagagtgagatttggtttttttatttaagaaaaagagaaaatttgtgattttggatttagatagtttgggtttgatttttagtttgttttggttaaggtttttaattttgtttatttttgtgtttttatttataaataggggaattgaaaaatagtattttttttttatagttgttgtaaagtaatttataggatagatttaataaatgttagttttttttttttttttaagatagatttttgttttgttgtttaggttggagtttagtggtatgattttggtttattgtaatttttattttttgggtttaagtaatttttttgtttgagttttttaagtagttgtgattataggtgtatgttattagtttggttagtttttttatatttttagtagagatggggttttattatattaattaggttggttttaattttttgattttaggtgatttgtttgttttggttttttaaagtgttgggattataggagtgagttattgtgttaggatttttttttttttttttttttttttgagatagggtttggttttgttatttaggtgtgatagtggtgtgattttagtttatagtaaatttgagtttttggttttaagtgatttttttattttagtt

SEQ ID NO: 757 - DNA, 6203 bp, Artificial Sequence
  chemically treated genomic DNA (Homo sapiens)
ggttgaagtgggaggattgtttgagattagaagtttgagtttgttgtgagttgagattatgttattgttgtatttgggtgatagagttagattttgttttaaaaaaaaaaaaaaaaaaaaaaaagttttggtgtagtggtttatttttgtaattttagtattttgggaggttgaggtaggtggattatttgaggttaggagattgagattagtttggttaatatggtgaaattttgtttttattaaaaatataagaaaattagttaggttggtggtatgtatttgtaattgtagttatttgggaggtttaggtaggagaattgtttgaatttgggaggtggaggttgtagtgagttgagattgtgttattgaattttagtttgggtgatagagtgagaatttgttttaaaaaaaaaaaaaaagttaatatttgttgagtttgttttatgggttattttatagtaattataaaaggaaggtattgttttttagtttttttgtttataaatgaggatataaaggtaagtaagattaagagttttggttaaggtaggttgggagttaaatttaggttgtttgagtttaaaattgtaaatttttttttttttttgggtggggggattgagttttgttttgttgtttaggttggagtgtagtggtgtgattttggtttattgtaagttttgttttttgggtttatgttatttttttattttagttttttgagtagttggtattataggtgtttgttattatttttggttaattttttgtatttttagtagagatggggttttattgtgatagttaggatggttttgattttttgattttgtgatatgtttgttttggttttttagagtgttgggattataggtgtgagttattgtgtttggttaaaattgttatttttatttttgtgttagtttttagtttaagttttttatgatataagagggaaattgaggtttagggaggtataatggtttttttaaggttgtatagttagttagggatataatttaagttttttggtgataggtttagggttgtttggattttggagtgtggtgggggtattttggtggtttttttttagttaatttttgtggttggtttggtttaggtttagttgggtgagttgatgatttaatgggtaagtattgtattttgtgattttggtttgttttgttgttttagagggtttttagtttttgggttggatgggtggtaatttgtttgagtgaaattgggaaagttttgttttttggtgtttagtgggtggtgggggtgttttttagttagttagtgagttgtggtgtttgttaggtttggtgggtggtgggaaatttgttgtgtgtgttttgttgtttatttttttattggttagttaggtttttggggtggtattttggggtagtttttttttgtgattgggtggtattggttttgggttttgtttttagtttagggttgtgaaggtgggatggagtaaggtggttgtaggttttggtgtgttgttggttgtagagagtttaggtagtgggtttggtaggtatagtttttagtggttttttttatttagtttgtttttttttttttttagtttgtttttttttgtttttatttttgaattttgtgggatgtgatttttttttaagatttaggtttttttggtggtgttatattttttttttagattgtatttttttttgttgagatttgagtttttgatgaaattgtgatttgtttgtaaattgggtgtttagtgttgtttattattgtggtgttgtttttagattttatgttggagattttattattttttgttttgttttattagagtttgttagttttttgtgttgtggtttttatttatttttttttagtttggtagaggagttatggtgttttttgtgggtttatttgatttttttggttttgtttagtttgattggggttgttgtgatggagagagttggattttggttttatttggatttaaagttttgtgtgtgggttattgagttatttagggagtttagggttttaatttagaggtttaaagttagggtttttaagttagattttagttttatttttagtttattgttaagaattggaagagagataggaggagtgttataggggaattttattgagaggaaatatggttatatttagtagatatgtttttttttaattttggttttgtattggtgtgtgtgtatatatatatatatatatatatatatatatatatttatttttagtttttgttattgtttagtttttagttataaggtgggatattttttaatttttatgattagaggtagtaggggtaggagggaggtaagaggaggggagaagtagtttggttttggggttgggaggaagtgggtgtggagagtaggggtgggggtatgattagtggttaggtgtgtttaatagttgtaagaagagtgggatttttagttttaggtggttttagttttgttagtttttttttatggagttttttggagtaagaatagtgtttaggggagaagggtggggttttttattttatattagtttttttggtagggtgggggattggagggggtagggtggggtggtggtgggtaatatttagttttggggtttttggggagttttgttttttttttttttggtgttgttggttgtttatagtgttaggttgttttgtagtagttgtatgatgagggtgttgtttttgtaggagtttttgttgagggtgtgtagattagttatggttttgttgaaagtggttttggttagagagatggtttttttggggttgttggtgattttgtagtggaagatggaaaagtttagggttaggtttaggtggatggggttggtgggtggtattttttttttgttgatgtttatggttttttggtaggttgattgggttgagttaatgatgtgttttttgttgttattggtggttattttggttaggtagtggtagtagttattttttatttttaggtagaagatttggtttttggtgtttttggtttttttgatgaggtggttgtttagtaggtttagtatggtgttgtatatgttttggagtttagtttttatttttttttggtatttatgtattttgggtttttttttttttgagttttttttgttgtttttttgtttaatattggatagtattttttaggtagttttttggttgtttattatgtttttataggttattgagagtaggttttgttttttgtaggagagttttttgtttttttttatggtgttttttatgaaggttgttatgtttttatagtgtttggtttgttttgttagtttggttttttggattagattggttttttttatggttttggggatatataggtgggtggtgggttaattgttgtttgggattaatgttggattttgtgttttttttgtttttggtttgttttttggttgggtggttaggtttagagaagggtggggaggagtagggggtgggattagggtttaagatttgtttttttttttttttttttttatattttttttggttttgtagtaaaggtaaaaaggttgggatgtgggggtgaattattagaatagttagtaggagaaatttgggtgtgggttttatttgtattggtatttttttaggttttaggttgtttttttttgtttggggttggtattatatggttgtttatattaggaaatggttttttaaattagatttatttttatagtgtttttttaggggttaaggatggttttagtttttggttgttttagttttgatagagtttataaaggtttaggaggatggggtttttaattttgttaggtaatttttttttttggtttaggtgaggataatttatgtttaggtagggttatggagttttttaagtatttttatatttatgattgaatttaatttttattatgtttttgtgatatatataggattatagagatgggaatattaagttttagagaggggtgagatttgtttaaagttatatagttattaattttttgaaatttttttttgtattttttttttttagttttttttttattgaggtttttgatttatgagttttagattgtgtttggaagtgagatttaggtttttttttagtttatttgaagatggttttattttttaggttttatttttttttagggttttttttgagtttttagaatgtgtaggtggtagtttttagagtgttgtttaatgaagtgtttaataagtagtttttgaagttttagtttagtttttgtaattagttatttagtaggtttgttggatatattttttattattatataatttttttttttaagttggtggtttgttgttatttgtttgaggatttattttttggttttttatgttaggttatttgttttttttaagttatatgttattaggtattagtggggtttatagagggtggggtttagttttttggttgttttatttttttgtttgatttagattgttttttgtttgaggttgggaagtagtttagtttgattttttaggggggatgttagtaatttggggagagagaggattgagaaagggaggtggtagtgatatatattattttgttttatggggtagtaattttagttatgtgatgttttttttagtttgttttttagaagtttatttgttttttttttttttttttttttaaatagagagtagattttattatattgtttaggtaggttttaaatttttgggtttaagtgatttttttgttttagttttttaaagtgttgggattatgggtatgagttattgtgtttggtttgttttttttttttgattattgttttatttttgatttttggtagagtttttagagatggagatttttgttgttaatgttttttttttgtttgttggagttttggttttaagttttattaagagttttatttaagggtgttggtattgagtttatagggatggatttttgtttatttgttttatttatagttaaagtttagatggggtttagaggtagggttttttttattgggattttgttgatttaatagttgagttaggataattttataggtttgtgttttttttagttattttgagtgtttgaatatttatttttttttttggagggaggtttaggttagaattttggggattaaagatgagatttttttttttgttataaggaggagtagggatatgtttgggttaatgttatagggtttttaaggaagtaaaggggattttaagtttgatgttttaaagattttgtttaaattagagaattgatatagaaaataataggaattatattaaaatattaatttttagagggtattttgaggtagtgagagtgagtgattttgtttttttttgattttttttttttttaattttttttttagagatagggttttattttgatgtttaggttgaagtatagtggtatgattatagtttattgtagttttaatttttttggttttaggtgatttttttgttttagttttttaagaataaggtgtttattataatgtttagttaatttttgtatttttttgtagagatagggttttattatgttgtttaggttggttttgaatttttgggtttaagtaatttttttgttttggttttttaaagtgttgggattataggtgtgagttattatatttggtttttttgatttttttattttttttaatttataaatagtgaatataggttggatgtggtggtttatgtttgttattttagtattttgggaggttgaggtgggtggattataaggttaggagattgagattattttggttaatttaggaaaattttgtttttattaaaaatataaaaaattagttgggtatggtggtatatgtttgtagttttagttatttgggaggttgaggtaggagaattgtttgaatttgggaggtggagtttgtagtgagttgagatggtgttattgtattttagtttgggtgatagagtaagattttgttttaaaataaaataataataaaaaagtgaatatgtattgtttgtttatgagatatagaatagattagtatttttggaattagattgtttaaatgtaatttttatagttgtttgtggttttggttaagtgatttaagttttgtgagttttagtt

SEQ ID NO: 758 - DNA, 6193 bp, Artificial Sequence
  chemically treated genomic DNA (Homo sapiens)
tatgtgaatttggggtgggggatgtatatttagtttatagtgatatttttgttttttttgggttttttttttgtaaaggggtttttgtaggttttggtttttaattaattttattagataatattttttaggattatgtatagggtatggtatatgtagtaggtattttggaggtttttgtttaattgttaaagtgattgtaaaagagggtaagtgtttgaataaggttttttatagaaattataataatagttaattagatattgagtattttttatgtgttaggtattttataaatatgatattatgtttttttataatgaattttatattatgtaggaataattatattaatttttattttttaaggttgtatggttaggaagttgtaagttggtatttgaatttggtattttggttttgggttatttgtatatatatatatatattttggagatggagttttgtttttgttgtttaggttggagtgtaatggtataatgtttgtttattgtaatttttattatttgggtttaagtgatttttttattttagtttattaagtagttgggattataggtatgtgttattatgtttagttaattttgtatttttagtagagatggggttttattatgttggttaggttggtttttaatttttgattttaggtgatttatttgttttagttttttaaagtgttggaattataggtatgagttattgtgtttggttttatttgtagtttttgattgttttgtgatgtttttgtttttttggagggtttaagatgtgggtgatgagattataggttgttttttgatttttgtgttgttttggattatggggttattggtatagtgggtggggtattagaggtaggttttgatattgtttttttgaattgtgagtattttagttttgttgtatttatttgttgtgtggttttggataaggttttagtttttttgaattttgattttatttgtaaagtgggtgtagttatagtttttgtgttattgtgttgttgggttaattaagaattaattgtgtgtaaagtgtttagttttgtgtttggtatttaaggttttgttattgtttttttttattttttggaatgataataataatagtaaataatattgtgtgttgtttgttatgtatttattttttttttgttataaggatttttatttgtattttttagttgttaggtttttatttttattttaaaggggaggaaatttataggtaaagtgatttgtataagaaaatgtagttattaagaagtgtagttaggatttgaatttaggtttgattggagtttttatttttagtttttaagtttttggtttattttttatttttagaagaggtgagatgatgttttttagagttaggaaggaaggggttggtgtgtggtggttgaatagtagtgtgatttgagtatttgtgagttaggaggtgagagagagtgtgtggtattttgtggttgggtagattattgtgggaggatgggatatgttgtgggagtatgggatatattatgggagatggtagtattattagttgtagggttatgtggatttaggtgatggttttaggttttatttataggtttatgatgggaagtttttgaatattttttaaaaattgttattttagaaaattatgataaagttatttttaaatgttaattgatatagggtgtaaagtgaaaaagggatttttttttttttattttatatttttgagatgaaatattgtgatgaatttggaatttttttagagttttttttttttaaagtttttttaatttttaatttttatgggtatatagtaggtgtatatatttatggggtatatgagatattttgatataggtatatattgtgtaataattatattagggtaagtagggtatttgttattttagttattatttttttgtgttataaataatttaattttatttttttagttttttttaaaattattattattattttatttttattttttttgagatatggttttattgtgttgtttaggtagagtgtatgtgtgtgtgtgtaatttttttttttttttttttttttttttttttttttttgagatagggttttgttttgttatttaggttggagtgtagtggtgtgatgatagtttattgtagttttaaattttagggtttaagtgatttttttattttagttttttaagtagttgggattataggttaatttttaattttttatagagatatagttttattatgttgtttaggtttaattttttttatagagataatagtagtttatgtttgttataggtttagtattatattaagtttattgtttgtattattatgtttgattgtttataattttattatgtgggtagtattgtttttattttttagaggaggaaattgaggttttaatatgtttagaggagattttattttgttgttgttttttttttattgaaatagtgtgttggggttttttattaggttatttttagtttttattttttgtaatggttgtattgttgtttatttgaggattggagtttttttatttaattagtttttttttgaggaatatgtaggttgttaatggttttttgtggagagttttaagtggaggaggtttagttgtttgtgaggtttatagagttgtttttggttgtggggggagggtggattggaggggtttatattgttgtgtttaggtttaggattatagggttttggtttgaaggattggagatagatagggtggaggggaggaatgtgtttgaggaagatttaggaattattttggggttttttaagggtagagttttatatagggtttggtatgtggtaggtgttttgtgaatatttggagaatgattggggtgggatgtgtaggggttgttgttgagttagtgatggggatgggggtgggggggagatgtaggtttagtgggaggtattaggttatttggggatttgttgagtttaaggtattgggaatgttgagggaaaagtttttatagtagtaatttggtattttttgagggagtgagttatagtgtaggttttttgtttgttgaggagtttagagtttatggtgaggagtggttttttgaaggaaaggggttatttttttttgggaattttaggtagttttattgtggggtttttattgtttttttttgatttttgtaagggtttatttttattttggaggttgtaagtggtggaagagatgaggggggttggtttttttttaaggagtaatttatggtgatttggtagttgggttttagaattaggaagtgtaaggatagagttttgtgttagggaggagggtggttttttatgaggttttatggtatggaagtagttttttgagattaatttttatttttattgagttattgagtgaagagttgtgtagtttttgagattagtttagttgatatggtggaattttgtgtttattaaaaatattagaattagttgggagtggtggtatttatttgtaattttagttatttaggaggttgaggtagtagaattgtttgaatttgggaggtgaagggtgtagtgagttgagattatattattgtattttagtttgggtgatagaggagattttgttttaaaaaaaaaaaataataataataattagttaggtgtggtatttggtgattgtaattttagttatttgggaggttgaggtaggagaattgttggaatttgggaggtggaggttgtagtgagttgagattgtgttattgtattttagtttgggtaatagagtgagattttattttaaaaaaaaaaaaaaaaggaaaagaaaaagaatgagagagtttggagtaaaaaaaaaaaaaaaaaaaaaaaaaggaaaagaaaaaagaaaaagattgagagagtttggagtggtttgagaagatgttttgaatatattaatatataaagtgaaaagagggaggtggtagtgtagaattttttttgggtattttagggttttagtttttttatttggaaagtgggggttatagtgttatttgtatgatttttagtgggttatttttgtttaaggatgttttgtttggagtttttttaggttttttttgggagtggggtgggttgttttatttttttattttttttttaaggttatttggttgttttgtgagagagatttttgggggtaggaggtggggtttgtgagttttagtttttgatttttatttgtttagtgtggtggtttttttttatttttatttatgttgtgtgattttaggtaagttttttaatttttttgtgttttaatgtttttaatagtaagataaagatatgattagtatttattttttagattattatgaggagttgatgagttaatgtttgtaaagtatttagagtaaggtttaatttaaggtttgagttttgggagtatttgaatattatggaatgatatttagtttttttagtgtggtattgtaggaataaagtaggatgtaaattatatatttatgtttatttagttttttgtttattttgtaaatagttttagagtatttagtgggtgttaggtttgttttggtttttgggggtatggagatggattttgtttggttttgatagttgtgagtgtatagtggagggtattgggtggattttagtttgttgattgttttgtgttgttgtgatgttggaaggaaatgtattattatatttaggtgtttgttttttaggggtagaattatggggtatttttttttatttttttttttttttttttttaatttttttgtagtttttaaagagtttattttgaatgataaaagttattatttatggaggtttggtaatgttttgtgttattttgagtatgttttgtgtattttttttatggatttttttagtagttttgatatgggtgttatttttgattgatagagaggaaaattgaggtgaagggtggttggttaggatttaaattagggagtttgttttagtattttggtttttaattttaattgtttgtttttttataaatattaggattaattattaagattaaaaaaatagttttataaattattaaatattgtatttggtggtttaggattttagttttgttttaaaggtttttgttatgttttttttgagtgttttagtgtggagtggtttttgtgtttgtgagtgtaggggttaggggttgtgttttttttttttgtttttttttaagaggtgatatgtatttttgatattggaagggtttttaaggtttagttttggttttttgtttttttttatggtatattagttaagtatttatttttttgtttttgattatttttagtgatagggagtttattttttaatatttattttattttaaagaaaatttaggtttttagatagttttttttttataaaaattttttaaaaaaatttttatttttttttaaagttttataaataagttttttgttttggggttttgaggtaggatttggttaatttgtttttatgtttttttatagtgaggagtatagggtttgttagtaggtattataaatgttgtattaggaagtaagtggttagggggtgggttggttgggtttttattaatttttgggttgtaggtaattaggttagtagtttttgtgggatattagttgggtgagtgttgatgggtattgtgattttaatggaataggttgttatagaaattgattttggatttgtttttaggtttattgatttgttttttaggagattatggtaattttttgagttttttagtaggtttttttagggtttttttaattttatattttttgagttgggtggtttttagggagtatgtaaattatatttttattgtgtagttgggtagtttgaggttttaggggtataggggataggttgaaatttatataggtagggggtgttttatagttgggttgggtgtttagggtaaatagttttgtttgaggatttagttagttagggggttttttttttatttatgggtttttagaggaaattttggattgatttttaggttttttgtttttttaaagaataattggaatttgtttttttggtgtgtttagaattatataatattaataatggttgaggtgatttgtgatgtttttagtattttatagtgttttg

SEQ ID NO: 759 - DNA, 6193 bp, Artificial Sequence
  chemically treated genomic DNA (Homo sapiens)
taagatattgtagggtgttaggggtattataggttattttagttgttattgatattgtgtaattttggatatattagggaggtaggttttgattattttttggggaggtagaaggtttgggaattggtttagaattttttttgagaatttatgagtggggaaaaggttttttgattggttgggtttttgggtaaggttgtttgttttgagtgtttagtttagttatgagatgttttttgtttgtgtgaattttagtttgttttttgtgtttttggggttttaggttatttagttgtataatgggggtatggtttgtatgttttttggggattatttagtttagagaatgtggggttggggaggttttggggagatttgttgaagagtttaagggattattatggttttttgagggataagttaatggatttggggataggtttaaagttagtttttatggtaatttattttattgaggttatgatatttattagtatttatttagttggtgttttataagaattgttgatttggttatttgtagtttaaggattgatgggggtttaattagtttgttttttagttatttgttttttggtgtagtatttatagtatttattagtaggttttgtgttttttattatagggggatatagagatgaattagttaggttttgttttaggattttaaagtaggggatttgtttatgagattttaagaggaagtaaaaatttttttaaaaaatttttatggaggaagaattatttaagagtttgaattttttttagaataaaataaatgttgaggagtgagttttttgttattggaggtaattaaagatgggagaatgggtatttggttgatgtgttatgaagggagatagagagttagggttagattttaagggtttttttagtattaaggatatatgttattttttggaaggggataagaagaaaagatataatttttgatttttgtatttataaatatgaagattattttatattggggtatttagaaaaagtataatagggatttttaagatgaagttaaggttttgagttattaagtgtaatgtttgatggtttgtgagattgtttttttggttttggtggttgattttggtgtttgtggagaggtagatggttgaggttaagagttggagtgttggagtagattttttggtttgaattttggttggttgttttttgttttagtttttttttttattgattgggaataatatttgtgttaggattgttgggagaatttgtgagaaaagtatatggaatatgtttaggatggtatggaatgttattaggtttttgtaaatggtaatttttattatttagagtggattttttgagaattataagaagattaaaaaaaaagaaaagaaaaaataaaagaaaatgttttataattttgtttttagaagataaatatttgggtgtggtggtgtgtttttttttagtgttatagtaatgtaagatggttaataaattggggtttatttagtgttttttattgtgtatttgtggttgttagggttaggtaggatttatttttatgtttttagagattaggatgggtttgatatttattaggtgttttggaattatttgtagaatagataaaagattaaatgggtatggatgtataatttgtattttattttgtttttgtaatgttatattgaaaagattaaatattattttgtggtatttaaatatttttagagtttagattttgaattggattttgttttaagtattttgtaaatattgatttattggttttttatgataatttaggaggtaaatattaattatgtttttattttattgttgaggatattaagatatagagaggttgaagaatttgtttgaagttatatagtatgggtgagagtgaaaaggggttattatattgggtaggtgggaattaggggttgaaatttataggttttattttttatttttagggattttttttataaagtagttagatggttttggaagaggggtgagaggataaagtagtttattttatttttagagaaagtttgagaaagttttgagtagaatgtttttgagtaagaatggtttattgagggttatgtgggtagtattgtggtttttattttttagatgaggaaattgaggttttgagatatttagaggagattttatattgttgtttttttttttttattttatgtgttagtgtgtttagagtatttttttaggttattttaagtttttttggttttttttttttttttttttttttttttttttttttttttttttttattttaagtttttttgtttttttttttttttttttttttttttttttgaaatggagttttattttattgtttaggttggagtgtagtggtgtgattttggtttattgtaatttttgttttttgggttttagtggtttttttgttttagttttttaagtagttgggattatagttattgaatattatgtttggttaattattattattattttttttttttgagatagagttttttttgttgtttaggttggagtgtaatggtgtgattttggtttattgtattttttgttttttaggtttaagtaattttattgttttagttttttgagtagttgggattataggtgagtgttattatttttggttaattttggtatttttagtagatatggggttttattatgttggttgggttggttttgaaagttatatggttttttatttgatgatttagtgagggtgggagttagttttggagggttgtttttatgttgtgggattttatgagagattatttttttttttggtatagagttttatttttgtattttttggttttggggtttaattgttgagttattatgagttgttttttggagaggggttaattttttttattttttttgttatttgtagtttttaaggtagagatagatttttgtgggggttaaggggaagtagtgggggttttataatggggttgtttgaggtttttagggaaaggtggttttttttttttgggaagttattttttattgtgggttttggattttttagtagatagggggtttgtattatggtttgtttttttgagaggtgttgagttgttgttataagaattttttttttggtgtttttagtgttttgagtttagtaggtttttaagtggtttagtattttttgttaagtttgtattttttttttatttttatttttattattgatttagtgataatttttgtatattttattttagttattttttaggtatttgtagagtatttgttatgtgttaagttttgtgtggggttttgtttttggggagttttggggtagtttttgaattttttttaagtgtattttttttttttattttgtttatttttagttttttaggttagggttttgtgattttaggtttggatatagtagtgtgggtttttttagtttattttttttttgtagttagaggtggttttgtaaattttatagataattgggttttttttgtttaaaattttttatagaaagttattaataatttatgtgttttttagagaggggttggttaaataaaggggttttagtttttaagtggatagtagtgtagttattataaagaatgagagttgagagtggtttgataagagattttaatatattgttttagtgaaaagaaggtagtggtagggtagaattttttttgggtatattagggttttagtttttttttttggaaaatggggatgatgttatttatataatagggttgtgagtaattaaatatgataatgtaggtagtgggtttaatgtggtattggatttgtagtaaatatgagttgttattatttttgtaaagaagattgagtttgggtaatatagtgagattgtatttttatagaagattaaaaattagtttgtagttttagttatttggaaggttgaggtggggggattatttgagttttggagtttgaggttgtagtgagttattattgtgttattgtattttagtttggatgatagaatgagattttgttttaaaaaaaaaaaaaaaaaaagagaagaaagaaaggaaattgtatatatatatatgtattttgtttgagtaatatagtgagattatgttttaaaaaaaataaaaataaaataataataataattttaaaaaaaattaaaagagtagaattggattgtttgtaatataaaggaatgataattgaggtgatggatattttatttattttgatgtgattattatataatgtatgtttgtgttaagatattttatgtattttataaatatatatatttattatgtgtttataaaaattaaaaattaaaaaaattttaaaaaaagaaagttttggaaggattttaaatttattataatgttttattttaaaagtgtgggatggggagaggaaaattttttttttattttatattttgtattagttgatatttagaaatgattttgttatgattttttaaagtgataatttttaaaaaatatttaagagttttttattataagtttgtggatgaggtttaaagttattatttgggtttatatggttttgtagttggtggtgttgttgttttttatggtgtgttttatgtttttatggtgtgttttatttttttataatgatttatttaattatagggtgttatatatttttttttattttttggtttatagatgtttaggttatattgttgtttagttattatatattagtttttttttttttgattttgaagaatattattttattttttttaagggtggagagtaggttaggagtttaggagttgagagtgaggattttagttaaatttgggtttgagttttggttgtattttttagtagttatatttttttgtgtaagttattttgtttgtgagtttttttttttttaaaatggggatagaaatttaataattgaaaagtatgagtgagagtttttgtggtaggaaaagaataagtgtatgataaatagtatataatgttgtttattgttgttattattattttagggaataagaggaggtagtggtagggttttgaatgttaagtataaggttgggtgttttatatatagttggtttttaattgatttaatagtatagtgatgtagggattgtaattgtatttattttatagatgggattaaggtttagagaaattaaaattttgtttaaggttatatagtaagtgagtgtagtagagttgggatgtttatggtttaggagagtagtgttagaatttatttttggtattttgtttattgtgttaatgattttatggtttaaagtaatataggggttagagggtaatttatgattttattgtttatattttagattttttagggaagtagaagtattatagagtagttaaaaattataggtggggttgggtataatggtttatgtttgtaattttagtattttgggaggttgaggtaggtggattatttgaggttaggagttagagattagtttggttaatatggtgaaattttatttttattagaaatataaaattagttgggtatggtggtgtatgtttgtaattttagttatttgataggttgaggtaggagaattatttgaatttgggtggtggaggttatagtgagtagatattgtgttattgtattttagtttgggtaataagagtaaaattttatttttaaaatatgtatatatatatataggtggtttggggttagaatgttaggtttagatgttagtttgtaattttttaattatgtagttttgggaaatgggaattggtgtgattgtttttatataatgtggggtttattgtgaggaagtgtgatgttatatttgtaaagtgtttggtatatagaaagtgtttaatatttaattggttattattatgatttttgtggaagattttgtttagatatttgtttttttttgtagttattttgatagttaggtaaaagtttttaaaatgtttattatatgtgttatgttttgtgtatggttttgaggggtgttgtttggtggagttgattaggagttaaggtttataaaagtttttttatagggaaagaatttagaaaagataaggatattattatggattgaatgtgtattttttattttagatttatatg

SEQ ID NO: 760 - DNA, 6193 bp, Artificial Sequence; identical to SEQ ID NO: 758
  chemically treated genomic DNA (Homo sapiens)

SEQ ID NO: 761 - DNA, 6193 bp, Artificial Sequence; identical to SEQ ID NO: 759
  chemically treated genomic DNA (Homo sapiens)

SEQ ID NO: 762 - DNA, 5999 bp, Artificial Sequence
  chemically treated genomic DNA (Homo sapiens)
attttttgtttatgttattagattttgaattttaaataataaaaatttttaaagtttttgtatattttaaaatataaattttatagaaataattttaaaatgttttttattataaaataagttattttttttatttatttatatagaggaaatatatatttgtgtttagtattttgtgttttattttttaattttaatttattgatagattttttttgtttagttttatattttttgatgagtgttttttggtttataattagttgtgaatatataaatgaataggtagtttttttaagtatgggtagggtgtagaagaggaatttattggattggggtataaagttagttgtttgtgagatttattattgggtggaagtgttttgaggttaggatttttatgttttgtgtttttttggatatagtatttagaaaaagattagtttaagatttggttttttataaatatttgtagaatgaattttttggaaagtttttaataagatttttaaatttttagggttttttttttttagtaatagaatgaggaaagttatatatgttattttgatttttataagtattaaataatagaaagttggggaatgtatttgtaaaaaagagagtattgtattagtattgatttttttttttttgagataagttttgtttttttgttaggttggagtgtagtggtgtaattttggtttattgtaatttttgattttttggtttaagtgatttttttgttttagttttttgagtagttgggattataggtatgtgttattatgtttagttaatttttgtatatttagtagagatggggtttttttatgttggttagaatggttttgattttttgattttataatttgtttgttttaggtttttaaagggttggtattataggtatgagttattgtgtttggttattattgattattttagtgagatttttagtatttagtatgggatttggtatataggaagtattaattgattatttgtttttagattatatgtatttttagtttatttgattttttatattgttgatggtttatgtatgatttttagaaattttatttttatatggaagaaattttgttttttatttttattatttttttatttttttttttgtttgttttttattgtattttttttggaggtatgtttgtagtttagttttttttgtagaattttgtgatattagaggtgtgtgtatttagaattaggtagatttttgaatttttattggttagttagtgtttagtgttgttttttataaataatgtttggagtgtgtttatatgtgtatttttttttggtaaagatagtaaatggaaggagataaggagttgtttaataaatttggtattgagatgaaataggaaataaagatatgtatttggataaagataaatattgttttgagtttttgattttgttaattttagattttttaagtgtttgtgttttaggaaaatgatttgttttattggtgtgttttattttttttaatattagatttaaaagtaagtttttttttagtattggattaatagttttgtttgaaagatgtgttttatttttgggaattggttatattgattttatttagtatttttaattttgatttagggatgttataagagaaattttttaaataagtaatttttttttatttttttgtttattttttaggttttttaatggttatagaatttatgtttgtgtttaatattatggtagttgggataaagaaaattaagatgaaatatttgagattgttttagttgaaataaattaattaaaattttataggtgttagttttgaggtaaaggtgggatagtgttaggtgaaatttttgggttttagttttagtttttttattattatgttttttttatttaaatatgttttattgttttgttatttatagatttaataatgtgatttggatattgggaataagagaataagatttgatggttgaaataaaatatattatgagagaattgtttataaggaaattttaagatgttaagatgtgggataggtagaaaggatagggttttgggagtattttgggtttttaggatgaatttgtattagttttggtgttgtgaggatattgtattaggttttttatttttgaatgttgttttagatgtttaagtagattgtgttgttgtttgtttttttttgttttgtgaattttatattgattttaagtgtatgaatgagttataagataaggtggaatttgttggttgggtatggtagatagtatttgattagtgttttggagggtggagttggggggtttttttatttgggattttgagggatttttgtggagtgttttgtgttatttggtggtttagttgtagagaaagtttttttttatttggggttttttgtggtttataggggattattttatattttgtgtagttagtggtggagaaattagttggaaatgtagtgggggtggagttgtttttgtgaggatttatggattgtttaattattatggagttttagtgataatgtttggagttgtttggtttgatttttggaattggattagttttttagtaatttgaattttttgatgggttttggggtttatttaggggtggtgaggtgggtttgggtgattatggtttgtttagtgtttggtatttgtgtgttttgagggtggttgtattattttgagttggtttaggttggagtttttggagtgtgattttttgtgtaggtatatagagaagaatttgtgtatggtgaatttttttatgtttaggtttattgttttgtgtttagtttggagtagttgtagggttgggggatgtgtatttttggtattttaggtgtggggtttaggtttgtgggtgggtatgtgtggttagggagtttggtatggtggttatgggtgtggggtgtggggtgtgagttgtggttataaagggtaggttgtgttggttattgtggttggggttataattgttttttttgtttttttttttgttttttttgtgagtattagtgttggttatgtgttatgtttatattatgtttattattattattattaattagtgtttgttgttttgtgttttggtatgtatattttttttttttttgttttgttttgttattatggttaattagtgtttattattttttttgtttttatttattattagtattgttaatgagagtttattgttttgtttgggagagttttgtttttgttgatatttttaattattagtgttgttttgtggttttaggtgtttatttttttttttttttttatttttttttataagaattagttttgtgtagttttgtttttatgtggttttgtttatggttttgtttatagtattgtttgttaattagtgtttgtagttgttgtatatttaatgagttttggtttgggatagtttttggtttgggtgagttgtgtagttgttttggagttgtgtagttgtgggtgtttttgttatgtaattttggtttggttgtttttttttttagtttggggttgttattatgttttttttttttaaaatatttttatgtatattttgttattatgtttttttttgttgaattaaattttaattgttgattagtaaatgtagttaaaattttagtggtatagtgagtgagggattgttgtttgttagtgggttttgtagtttggttaggagttgttttttgtggaattggtgttttttttttgttggagtggataaaggtgtttgagggtgggggtttaggtagtttttggggtgttttttttttgtggttgtagaataaagatgtatttgttttttgtagttggttttgttttaggaaatgtttatatagatggtttattagggtttgtgttgggaatatttgggtggggtgatttgggtttagggtaaggtttttagatttgttgttggtggtagtgttgtttgggatttgttttaaagggaaatatttttttttttttttttttagaaatgtttattaagggttgtagtagggttgagaatgtgggtttatgattttgtgtagtttgttttgttttttttttgtgtatgtgttgagtttgtatttaaaaatagggagaaattgagtttattgatatagtattattattatttgtaaagagtagaaatgagtgtggtggtgagttgataagttttgtttgtttttttgtagtgtgaattgtaaaatttttgtgttgttttgttttttggattagttagatgttgtgttaatatttgtgtagtttattttggttaaggtgggtagagaggttagaatgtttttaaataagagttttaaagttatgttgtatttgggttgaggtgaggttagataggttttttgggttttttggagatttgtgttgagtggtgttgttttggagtggaagttgggagtttagtattatgattttggtgttgttttttttttgtttggtgaatttgggtgttgttgtatgttgtttttatgatttatttttaagaggaaaatatgagtgaaatttgttttattttttttattggatattaagaggtttatgtaagattatggatgtgggagtgttttgtgaatttaaatagtgtaattgatttttatattatgtattaaaggatttataatgattattttttaaaaatagaagtgtaggattttataaggatattaaatattattttttgtttttttttaagatggtgtgttagttaagtgtttatgaaaattgttttgtttgttttttttaaggttttgttgggagggtagtaatttgtgtttttagaattagttttttagtgttttgtatttttgttgggatttttaggtattttggttttaggtaaatataaagatattttgtatttagtatgggaagaggtagatggatttttaattggatatagattttgggaatgagggaggattaatttgattatgttttttttggaaggggagttagtaatattggttggagataggagtgttgaatgttatttatattaatttatgggtattttgtttaggataaaagttttaaggtaggtaggtttaagttaaggtttgtgttgtattaataatagtattttgatttgatttgataaaattggaaaggaaatattttatgggatatttattagttttttaaatttgaaggtaataaaattgttttgttgaatttgggagggaaaattatttagattttattggaatttattgttagaataataaatttgtttgtttttgttttttttttggtaaaatatatgtatattaaaatttttagtgattatggaatattattttatgtgattatgtaatgaaattttttaaaattattaaatttagggtaggtataatattaagatttattgtaattgaaatttaaattatttttattaaatattagaaaagaaagtgaatttgataaaggtttttgtttagatgatggaatgggagaggattgaagagaagataaagagtttggtagatttttgagtattttatattttttttgatttaagtatagtaagtttgagattgaattttgtggtgattgttgtttttatgagtattagattagttgatgtgtggttaatgtaattttataagtgattattgagtattaatatttggtattgtggtggttatttgtgatataaaatgattataatattttaagaagtttatagttttatggaagagaaggtgagtgaatagataaagtttatgttgtttttatgtaaagtgaaagaaatgtgtaagagatgaatgagaagttaattttaattggtgaagttaaggaggagatggtttttgttttgaatttttgagggtaagaagatgagggaataagttttttggatagataagaggaggtgggagttttaggttgaggaataatagggtattgttaggtagttgtgataaggttttttattttttt

SEQ ID NO: 763 - DNA, 5999 bp, Artificial Sequence
  chemically treated genomic DNA (Homo sapiens)
ggagagatgggaaattttgttatagttgtttgatagtgttttgttattttttagtttgggatttttgtttttttttgtttgtttaggaaatttatttttttatttttttatttttaggggtttagagtaaaggttattttttttttgattttgttaattagaattggttttttatttattttttatgtattttttttattttatataaaaatggtatgagttttgtttgtttatttatttttttttttataagattgtgaattttttgggatgttgtaattattttgtgttataaatgattattatagtgttagatgttagtgtttgataattatttgtggaattgtattgattatatattagttaatttggtatttatagaagtagtagttattatggaatttagttttaaatttattgtgtttgagttagaggaaatgtgagatatttagaggtttattaagttttttattttttttttagtttttttttattttattatttgggtaagagtttttattaagtttatttttttttttggtatttggtaaggataatttggattttggttatagtgggttttgatattatatttattttagatttagtggttttggaggattttattatataattatatgaagtagtgttttatgattattagagattttggtatatgtgtattttattaggagaaaaataaaggtaaatagatttattgttttagtaatgaattttagtgaaatttgaatgatttttttttttaagtttaatagaatagttttgttgtttttaaatttggggaattaatgaatgttttatgaaatattttttttttaattttgttagattaggttaaaatattattgttggtataatataagttttgatttaggtttgtttgttttggggtttttgttttgaataggatgtttatgagttggtataggtggtatttagtatttttgtttttggttagtattattggttttttttttgagggaagtatggttgggttggtttttttttatttttggagtttgtgtttagttggaggtttatttatttttttttgtgttgggtatagagtgtttttgtgtttgtttagagttaggatgtttgagggttttagtagggatatagggtattaagaggttggttttgagagtatagattattatttttttagtagaattttaaaggaagtaggtaaagtagtttttatgggtatttaattggtatattattttgaaaaggagtaaaaagtggtgtttggtgtttttgtggggttttgtatttttgtttttaaagaatagttattatagattttttaatatataatatgaaaattaattgtattatttaaatttataaagtatttttatatttgtgattttgtataagttttttggtatttagtaagggaggtgagataggttttatttgtattttttttttagagatgagttgtgggaataatgtgtaatggtatttaagtttattaagtaaggaaggggtagtgttagagttgtggtgttaaatttttggtttttattttggagtagtattgtttaatgtgggtttttaggaaatttagagagtttatttgattttattttagtttggatgtagtatgattttaaagtttttatttaaggatattttgatttttttatttattttagttaaaatagattatataagtattaatgtaatatttgattagtttagggagtaaaataatgtgaggattttgtagtttgtattgtaaaagagtaagtaagatttgttaatttattattgtatttgtttttgttttttgtaggtggtgatggtgttatgttaatgggtttggtttttttttgtttttaaatataaatttaatatgtgtataagaggaaaatagagtaggttgtatggggttgtgagtttgtatttttggttttgttgtagtttttggtgagtatttttaggaaaaaaaagaaaaaagtgtttttttttaaggtggattttgagtggtgttgttgttagtagtgggtttgagggttttgttttagatttaggttattttgtttgggtatttttagtgtgggttttgataagttatttgtgtagatgttttttagagtgggattggttgtggagggtggatgtgtttttgttttgtagttgtgggagggaggtgttttgagggttgtttgagtttttgtttttgggtgtttttgtttgttttggtggagggaaggtgttggttttgtggagggtggtttttggttgagttgtagggtttgttggtaggtggtggttttttgtttgttgtgttgttgaggttttggttgtgtttgttgattaataattaaagtttggtttggtagagaaaaatatgatgataaagtgtgtatagggatgttttaaggaaggaaaatataatgatggttttaagttggaagaaagagtagttgggttgaagttgtgtgataggaatgtttgtgattgtgtggttttggagtagttgtataatttgtttgggttgggagttgttttgggttgaggtttattaggtatgtggtggttgtgggtattgattggtgggtagtgttgtgggtggggttgtgggtggaattgtgtgggggtggggttgtatggagttggtttttgtaggaaggagtagaaagaggaggagggatgggtatttggaattatagggtggtgttgatgattggaggtattggtagaggtggggtttttttgggtggggtggtgggtttttattggtagtgttggtggtgggtgggaatgggaggggtggtgagtgttgattggttgtagtggtggggtggggtggaggaggaggaggtgtgtgtgttggggtgtggagtggtgggtgttgattggtggtagtggtggtgggtgtggtgtaggtgtggtgtgtggttggtgttggtatttgtaggggaggtggagaaggaggtggagggagtgattgtggttttggttgtggtggttggtgtggtttgttttttgtgattgtagtttgtgttttatgttttgtgtttatggttgttgtgttgggttttttggttatgtgtgtttgtttgtggatttgagttttgtgtttgggatgttggggatgtgtgttttttggttttgtggttgttttgggttgggtgtggggtgatggatttgagtatgaagaagtttgttgtgtgtaggtttttttttgtgtatttgtgtaggaagttgtgttttaagagttttagtttgagttggtttgaggtaatgtggttgtttttggggtgtgtaggtgttgggtattgagtgggttgtggttgtttgagtttgttttgttatttttgggtggattttgagatttgttagggagtttaagttattggaaagttggtttggttttgaaaattgaattaaatggttttaaatgttattgttgggattttgtagtaattgggtggtttgtgggtttttgtgggggtaattttatttttattgtatttttagttggtttttttgttgttggttgtatggggtgtgggatggttttttgtgggttatagggagttttgggtgaggaggggttttttttgtagttagattgttgagtggtgtggagtgttttgtgggggttttttaaagttttgagtggagaagttttttagttttgttttttgaggtgttgattaggtgttgtttgttgtgtttggttggtaggttttattttattttgtagtttatttgtgtatttgaagttagtgtagaatttatagaatggggaagaataggtagtagtataatttgtttaggtgtttaaaatggtgtttaggagtaaagagtttgatgtaatatttttgtagtgttgaggttgatatagatttgttttgaaaatttagagtatttttaaagttttgttttttttatttgttttgtattttggtattttagagtttttttgtggatggtttttttgtggtgtgttttattttaattattaaattttatttttttatttttagtgtttaaattatattgttgaatttatagatgataaaatagtgaaatgtgtttaagtgaaaaagatatggtgatggggagattgaggttgggatttaaagattttgtttgatattgttttgtttttgttttaaggttggtatttgtggggttttggttggtttgttttagttggaataattttaaatgttttattttggttttttttgttttagttgttatgatattagatatagatatgggttttgtaattattgagagatttgaggaatagataaaaaagtagaagagaattatttgtttaaaaagttttttttatggtatttttaaattagaattggaagtattagataggattagtatggttggtttttgagggtaaaatatattttttaaataaaattgttaatttagtattggaggagggtttgtttttaagtttaatattgaaagaaatgaagtatattagtgaggtaaattatttttttgggatataggtatttaaaaaatttgaagttgataagattagaaatttagaatagtatttatttttatttggatatatgtttttgttttttgttttattttaatgttaagtttattagataattttttgtttttttttatttattgtttttgttaagaagaggtatatgtgtgagtatattttaggtattgtttatgaagagtagtattagatattggttgattagtgggagtttaggaatttgtttgattttggatatatatgtttttggtgttatagggttttgtaaggagggttgggttgtaggtgtgtttttggaaagaatatagtgggaaataagtgggggggggggtgggggggtggtgggaataggaaatgaggttttttttatgtagaaataaaatttttagaagttatatataaattattagtgatgtaggaggttaaatgggttgaaaatatatgtagtttaagagtaagtagttaattagtgttttttgtgtgttagattttgtattaggtgttggaggttttattaagatggttaataatggttgggtgtagtggtttatgtttgtaatgttagttttttgggagtttaaggtgggtggattatgaggttaggagattgagattattttggttaatatggagaaattttatttttattaaatatataaaaattagttgggtatggtggtgtgtgtttgtaattttagttgtttaggaggttgaggtaggagaattgtttgaattagggagttagaggttgtagtgagttgagattgtgttattgtattttagtttggtgagagagtgagatttgttttaaaaaaaaaaaggttaatgttaatataatgtttttttttttataaatgtattttttagttttttattatttgatatttgtgaaaattggggtagtatatgtaattttttttattttattgttaaggggaagaaattttgagagtttgagagttttgttaaaagttttttaaggaatttattttgtaagtgtttatggaggattgggttttgggttggtttttttttggatattgtgtttaaaaagatatgagatatagaagttttggttttagggtatttttatttagtgatgagttttataagtagttgattttgtgttttagtttagtaagttttttttttgtgttttatttatatttgagaaggttgtttgtttgtttgtgtgtttatagttggttataggttaagaagtatttattaaaaaatgtaaaattgagtaggggaggtttgttaatggattgaggttgagaaataggatataaagtattgaatatagatgtgtattttttttgtgtggatgaatgagaaagataatttgttttataataggaaatattttaaaattgtttttgtgaaatttatattttgaaatatataaagattttgaaaatttttgttatttgaaatttaaagtttagtgatataaataggaaat

SEQ ID NO: 764 - DNA, 6091 bp, Artificial Sequence
  chemically treated genomic DNA (Homo sapiens)
agtattttgggaggttgaggtgggtggattgtttgagtttaggagtttgagattagtttgagtaatatggtgaaattttgtttttattaaaatataaaaaattagttgggtatggttttagttatttgggaggttgaggtaggagaatggtttgaatttgaagtggaggttgtagtgagttaagattgtattattgtattttagtttgggtgatagagtgagattttgttttaaagaaaaaaaaaaggtaaaaaaaagggtaatttttttttttttattaattttatttatttatttgtttatttatgtttttgagatagagttttatttttgttgtttagtttagagtgtagtggtataatttgggtttattgtaatttttggtttttgggtttaagtgatttttttgttttagttttttgagtagttgggattataggtgtgtgttattatatttagttattttttttgtatttttagtagagatggggttttattatgttggttaaggatggttttgattttttgattttgtgttttatttgttttggttttttaaagtgttgggattataggtgtgagttattatgtttggttttatttttttatttttagtaaagataagattttattatgttggttaagttggtttttaatttttgatttgaggtgatttgttttttttggttttataaagtgttgggattataggtgtgagttattgtgttgggttgaatggattggattttaaagtatattttaggtagatggaataagggaatagtttgagtaatggtgatgagaaaagaaagaattggttaggtgtggtggtttatatttatgattttagtattttgggaggttgaggagggtagatttttttaggttaggagttgaagattagtttggttaatatggtgaaattttatttttattaaaaatataaaaattagttaggtgtggtggtgggtatttgtaattttagttatttggggggtagaagttgtagtgagttaagattgtgttattgtattttagtttgggtgatagattttgttttaaaataaaataaaataaataaataaataaaaaagaaataattgtatttgatgatttggtgagttagttagtataagatatgtgtattagggagtagtataaaattataaggttgtttagtttggagttagagtaatttgttaattttatttttgaggtaatgggaggtgtttaaagtttttttgtgatgttgtttgaattatattttaggaagtttatggtggtaggatgaattgaaggtataggaaaaggttttaatatttaatagtttagggaaaagaaatggaggatttgtaattaggtgttggtattaagggatggagttttgtttagattttttttttgtagatttttttttttttggatggaaaatgataaaaggaaatttttttgatagtaaattataatgttgattttaaaattaattttagataaaggtgattaaattgtaaatttaggatgtttgtttgaatggtttttgtatttaaagatatttttttttttataggagtattggataaatttaattttttaatttgttaagggttttgtggaagagtttggagggggattgaaggtggaattgatattgatatatttgggtttgtaaatttttaaaattgaggtttagaattagtaaattagggtagggtatttttttttttggaagggaagtttttatttttaaagtttttttaatggaatttttatattagagaagtgtaattgattgagaagtggaagtgattaggaatagtatttttgttttttgggtgggagagagaatttttttgggtggagttagtagtaggttagtttttgagggggtttttatgttggtggtgttgatttgtggtgtaatgttttgagtaggagaattttaaatatatgtttgagatttaatttttagaaatgtaattagtttttataagttaaaaaaataaaaataaaaaataaaaaaaggaagtgatttttttttaagaggttaaagggtttggaagaagaggttttggtttgagtgttttaaggttttttggggtttaatttggttggaatgggttgtagtatttatatttttgtttttggttgtgttttaatgaagaattgaaaataataaggggtggagaaataattttttttttttttttattatttttttatagtgtaaataaataaataattttaagtttgatttttttatttgttaggggtggggaaagatttgatattaggatttttttattttattgttatttgttttaatttaaatatttttatgatttattttagaagtgttaattttttgtttataaggagtatggaagttttggtttttggttattgtgtagattttattttggatttattttttaattttttgttgtttttttttttgtttttttagtagagggtgtaggtttaaaggttttgttgattttgttttagtttggttttgttttgttttggtgtaggggtggggaagatgggtatagaaatttggttgtggttttttgggagttgtgggtatgtgagttgtttgaagttggtggtttggggattgttgttgtttagtttggttgtggttggttgtttttttgagtttattagtaagttggtttgtttttgggatgtgttttgtttgttttgggtttgtgtgttttgaaggggtgtgttttgtgtatttttggtgttgtttatttttttttttatggttgtttttttttttgtttggatagttggtggtggtggtggtggtggtggtggtggtggttgggagaggttttttttttatgttttgttttttttttttgtttgtagttgagttgagttggtggatttgtttgggttttgattttgtttaggttatggttggtaatgtgaagaagagttttggggttgggggtggtagtggttttgggggtttgggtttgggtggtttgattgggtttatgaaggatgttttttagttgtattattattattattattattttagtttttatttgttggggatggtggataagaagatggtggagaagtgttggaagtttatggataaggtgaaaggttggttgagtgtttgttgttgtagggtgggtgtgggtggagggttgtggggaggggaatgagtggatggaggaagtgggggaggggatgggtttggtgaagttggggaggtgtggagttggggtgattggttgggggtgtgggggtagggatgaggttgggagggtggggggtggtgtgggggaggggttgttgttgggagttggggaatgttggggtgttgtgtttggggtagttagataaagatggagtgggggttggggtgaaggttaattgggaagttagtggggtggaagtataatgaggggtgtggagtttggggttttgtgtagggtgtagggatgtaggttatggaattggtttgggaggttagtagggagggggtgaggaagagtgatgtattggttggggtttttggttgggtgagatttgattagggaattaggtttatgggttttgattgaggaatttggttggggttaggatagtttttagggaagttgtgttttgggtgagagtatagtttttttttattaagatgtaatatgaagataaaagatatattgatgtttaagtgaggtaaggaaagaatttttttttttatttagtgttggtttaagttttttgttatttttagaaatattggatgtgatttattgttggtgttgagatatgtattgattaaattataagttttggttagaattattattttttgaaagatggattggttgagtttgttaagtagtagtagattttgattttttaataattttttttttattatattgtttgagttgggttttttttttttggtaatggttttgattttttattataggttttgattttaaatttgtttgttgagtttttttgattatgtttttttgtttgtttgttttttgtaagtgtgaataaaaataatttttttatatttagttattaagtttgttatttgggagaattttatttttttatagttgtgtttatatgatgaaatgtagttagttttaagtatttaattgtttaagtagttggatgttttgttagaatttaatatgtttttttggtattttttatattttttaattaattattttgataaaatttatattgtgtatgaaaagtgattagaagtatttggtatgttttaagagaatggtgttattttttttagggtaaaatttggttttttttggtttttttttgggttttggttttttttttgtaaagttttttatgggttgttttggattagaaattgttaataaaatgattatgaagtatttagttaatgtaatgtgtaatttaaatgtttaataagttttgtgtgtgaattaatattttagtagtgtatgttagtggttttatagttatttttttagggttggttttttttatgttaaataattggtattgtaattaatgatataagtatttgtgtgttgattatattggtggtgtagtattaattttattgttagaaattataataaaatttttatagaaagtttaggtgtgtaaaggaaattttaaatgtgttgatttttttaaaaaaaatatattgaagatatttaaatgttaaagtttgttagtttgttttttagggatttattgttaaggattataaattttattttggtatagaaaaaatatttttttaatgagtgttttgtattagatatgtgggtgtagtataattaaaattgtgttgattagtggtttttgtttaagaataatttgtttattaaagagtttttgtattttgtattttttttttttttttgagatggagttttttgtttttgttatttaggttggagtgtatggtgtgattttgatttattgtaatttttgttttttgggtttaagatatttttgtgttttagttttttgagtagttgggattataggtgtgtgttattatgtttagttaattttttgtatttttagtagagatggggttttattatgttgattaggtttgttttgaatttttgattttaggtgatttatgtgttatggttttttaaagtgttgggattataggtgtgagttattgggtttggttttgtatttttaaagaataagagtattttgtatttttattaaagtgtttttataaatatagagtaagttgtagatagttttattttataaggtagtttaaataaaatttttttttaagttttatttttttatttatttaaagtatgtgtattgaattttgatttattttgtagaatgtttaattatttgggaagaataaagaggatttaaagtttagatttaaattgttttttaggtttgatagttttatggaaagtaggtttttagttttttttttttagtgtagggagagggatgttttatttttgtattatttgttttggaagttgattttaatattgtttgttttttttttattatgtatttttagttgttttgaaaatgtagtattttttaatgtgttagtttgatatgtttatattgttttttagattttttgaatatttttgtgatgttattagattgtattattttttttatttttgatgttttgagtataaggtgttttttttttttattttatttttattgttgaaagttttaaatgtgttattatattttgattttatgtgttataagtggtgaagaatttattgttaaatttatagatgttttatatatttaattttttttaataaaatttttgggttgggttttgtggtttatgtttgtaattttagtattttgggaggttgaggtgggtggtttatttgaggttaggagttttagattagttttgttaatatggtgaaatgttgtttttattaaaaaatataaaaattagttgggtgtggtggtagatgtttgtaattttagttatttgggagattgggataggagaattttttgaatttggggtagaggttgtagtgagttaagattgtattattgtatt

SEQ ID NO: 765 - DNA, 6091 bp, Artificial Sequence
  chemically treated genomic DNA (Homo sapiens)
agtgtagtggtgtgattttggtttattgtaatttttgttttaggtttaagggatttttttgttttagttttttaagtagttgggattataggtgtttgttattatatttagttaatttttgtattttttagtagaggtagtattttattatgttggtagagttggtttggagtttttgattttaagtgagttgtttattttggttttttaaagtgttgggattataagtgtgagttatggggtttggtttagaaattttgttaaaaagaattaaatgtgtgggatatttgtggatttgatagtaggttttttattatttatagtatatgaagttaaggtgtggtgatatatttaagatttttaataataaaaataaagtgaaaaaagaggatattttatgtttaaaatattaagggtaaaagagatggtgtaatttagtaatattatagaggtatttagaaaatttggaaagtagtataaatgtattagattaatatattagaaagtattatgtttttagagtaattagaaatatgtgataagaggggaatagatagtattaaaattaatttttgaggtaagtaatataaaaataaaatatttttttttttatattggaagggaaaagttagaagtttattttttgtgaaattattaaatttgaaaagtaatttgagtttaaattttgagttttttttattttttttaaataattaaatattttgtagaataaattaaaatttaatatatatattttaaatagatgaaggagtaagatttaagggaggattttatttgggttattttgtagaataggattatttataatttattttgtatttatagaaatattttaataagaatatagaatatttttattttttaagaatatagggttaggtttagtggtttatatttgtaattttagtattttgggaggttgtggtgtatggattatttgaggttaggagtttgagatgagtttggttaatatgatgaaattttgtttttattaaaaatataaaaaattagttgggtgtggtggtgtgtatttgtaattttagttatttgggaggttgaggtatgagaatgttttgaatttaggaggtggaggttgtagtgagttgagattgtattatgtattttagtttgggtaataagagtgaaaaattttgttttaaaaaaaaaaaaagaatatagaatatagaaattttttagtaaatagattatttttaagtagaggttattaattaatataattttgattgtattgtatttatatgtttgatatgagatatttattagaaaagtattttttttatgttagagtaaaatttgtagtttttaatgataaatttttaaaaagtaaattaataaattttagtatttgaatatttttgatgtgttttttttaaaggagttgatatatttaaagttttttttatatatttaaattttttgtaaggattttattataatttttaataataaaattagtattatattattaatataattaatatatgaatatttgtgttattaattataatattaattatttaatatgagaaaagttagttttaaaaaggtggttatgaaattattggtatgtattattggagtgttaatttatatataggatttattaagtatttaaattgtatattatattggttaagtgttttataattattttattagtggtttttagtttaaagtaatttatgaagaattttatagaagaggaattgaggtttagggaggaattaaagaaaattaaattttattttggaggaaataatattatttttttaaaatgtgttagatatttttaattattttttatatgtaatatgaattttgttaaagtaattaattaaagaatatgaaaaatattaagaaaatgtattgaattttgataaagtgtttgattgtttaaatagttaaatatttgagattgattatattttattatatagatataattataaggaagtaaaatttttttaaatgataaatttagtggttaaatataaaggagttatttttgtttgtatttgtaaaaagtaaataaataaaaaagtgtaattaaagaagtttaatgaataagtttaaagttaggatttgtaataaggagttagaattgttattagaaaaaaagaatttagtttaagtgatgtagtagggaggaagttattaagaagttagaatttgttgttgtttaataggtttagttagtttattttttagaagataatagttttaattagaatttgtggtttaattagtgtatattttagtattagtaatggattatatttagtgtttttgagggtaataaaaaatttgagttggtgttagatggggaggaaagttttttttttgttttatttaaatattaatatgttttttatttttgtgttatattttaatgagaaaggattatatttttatttagagtatagtttttttgagagttgttttgattttagttaggttttttagttagagtttatgaatttaattttttagttagattttatttagttaagagttttagttggtatattatttttttttattttttttttgttaattttttaggttaattttgtgatttatatttttatattttgtatagagttttaaattttgtattttttattgtatttttgttttattgattttttagttaatttttgttttagtttttattttatttttgtttggttattttaaatgtggtattttagtgttttttgatttttaatggtagttttttttttatgttgttttttatttttttggttttgtttttgtttttatgtttttggttggttattttggttttgtgtttttttggttttattagatttgtttttttttttgttttttttgtttgtttgtttttttttttgtggttttttgtttatgtttattttgtaatagtgggtgtttagttggttttttattttgtttatgagtttttagtatttttttattatttttttgtttattgtttttggtgggtgggggttgaggtggtggtggtggtggtggtgtggttggaaggtgttttttatgagtttaattaggttatttgaatttgagtttttggagttgttgttgtttttggttttagagtttttttttatgttgttggttatggtttgggtagggttggagtttaggtgggtttgttggtttggtttgattgtgagtgagggagagaagtagggtgtgaaggaggggttttttttggttgttgttgttgttgttgttgttgttgttgttggttatttgggtggagggaggagtggttgtggggaggggagtgggtggtgttgggagtgtgtgggatgtgtttttttagagtgtgtgagtttggggtgggtggggtgtgttttggaggtggattggtttattggtaagtttggggaagtggttggttgtggttggattgggtagtgatgatttttgggttattggttttgagtagtttgtgtgtttatagtttttggaaagttgtggttaggtttttgtgtttgttttttttgtttttatgttggggtggggtggggttaggttggggtggggttggtggaatttttgggtttgtgttttttgttggagaaatggggaaaggagtggtggggggttggggagtaggtttaaggtggagtttgtgtagtagttagaaattaagatttttatgttttttgtgggtgggaggttggtgtttttggggtgggttatgggaatgtttaaattaagataggtggtgatggaatggaagagttttgatgttaagtttttttttatttttgataaatgaggaaattgagtttagagttatttgtttatttatattgtgggaggatggtgggagaaaaaggaaagttatttttttattttttattatttttaattttttattaagatatgattaaggataggaatatgaatgttgtggtttattttagttggattaggttttagaaagttttgagatatttaagttaggatttttttttttaggttttttgattttttgaaaagaaattattttttttttttattttttatttttatttttttggtttgtgaagattagttatgtttttgggaattgaattttaaatatgtatttaagatttttttatttagagtattgtattataggttggtgttgttagtatgagggtttttttagaagttgatttgttgttggttttgtttgagggggtttttttttttgtttagggaatagaaatgttgtttttggttatttttattttttagttaattatatttttttaatgtaaaagttttgttggaagaattttgaaaataggaattttttttttaaagagggaagtgttttgttttaatttattaattttgagttttagttttgggagtttgtagatttaggtgtgttagtattagttttgtttttgatttttttttaggtttttttataaagtttttgatagattagggagttaaatttatttggtgtttttgtaaaggggaaaatatttttgaatgtagggattatttagataggtattttgggtttgtaatttaattgtttttatttagaattgattttggagttaatattataatttattattagaagaatttttttttattattttttatttaggaagagaagaatttataaagggaaaatttaggtaaagttttattttttagtgttaatatttagttgtaggttttttgttttttttttttggattattgaatattgaaatttttttttgtgtttttaatttattttgttattataggttttttaaagtatagtttagatagtattgtaaaaaaattttaaatattttttattgttttgggaataaaattgataagttgttttaattttaagttaaataattttgtagttttatattattttttggtatatatgttttatgttagttgatttattaagttattaaatataattattttttttttatttatttatttattttattttattttgagatagagtttgttatttaggttggagtgtagtggtataattttggtttattgtaatttttgttttttgagtagttgggattataagtgtttgttattatatttgattaatttttgtatttttagtaaagatgagattttattatgttggttaagttggtttttaatttttgatttgaggggatttgttttttttagttttttaaagtgttgagattatgggtgtgagttattgtatttggttaattttttttttttttattattgttatttagattatttttttattttatttgtttgaagtatgttttaaaatttaatttatttggtttagtatagtggtttatatttgtaattttagtattttgtgaggttgagggaggtggattattttaggttaggagttggagattagtttggttaatatggtgaaattttgtttttattaaaaataaaaaaatgaggttgggtgtggtggtttatgtttgtaattttagtattttgggaggttgaggtaggtgggatatgaggttaggagattgagattatttttggttaatatggtgagattttatttttattaaaaatataaaaaaaatagttgggtgtggtggtgtatgtttgtaattttagttatttaggaggttgaggtaggagaattgtttgaatttaggagttagaagttgtagtgagtttagattgtgttattgtattttaggttgagtgataagagtgagattttgttttaaaaatataaataaataaataaataaataaagttaataagaaaaggaagattatttttttttttattttttttttttttttgaaatagagttttgttttgttatttaggttggagtatagtggtgtaattttggtttattgtaatttttattttgggtttaagttatttttttgttttagttttttgagtagttgagattatgtttagttaattttttgtattttaatagagatagggttttattgtgttgtttaggttgattttaaatttttgagtttaggtaatttatttattttggttttttaaagtgtt

SEQ ID NO: 766 - DNA, 15001 bp, Artificial Sequence
  chemically treated genomic DNA (Homo sapiens)
taggtttaggggtggtgtttattaggtgtggggggtgggagaggataggtgtttagttttgagtatttttggggagttttgggatgggtagaggtttaaatgggttttgggtttttagtgttttttttttgtttggttttatagatttagggaatagatggtgattagggtttattttaggagatgggtgtgagtgaaggggttttatgtggtttttgtttttggtattttagtttagtatatagatttttttaggggaggagtaggatttttagggatttggggtaaggggtttagagatatatagttttttttttttattttttgtttagagggttagttagaggattatttgggggggtgttagttgtagttagggttgtggtgtgtattttaatgagtttagtttagataggatgttgggtgggtggttagttttgatagtagatgtggtagggttttattattttttgatttaggattggggtgatataggatggggtaggtggaggagatagttatttggggtttagtattattgtttttatggttataggatgtttgtaggtttgtatttgtttattttgggttttttaggagggtgggagtatagatatattagttagggttgtttttttagattttttatataaagagattaatttatatggagtttttttttttattattttgagggtttttaggggaattggaatttgttatttaggatttaatttgagttttttattttgttgtggtttttagatgttttttatttgaggtaggagtatagtttatttgaagagtggttttttaatttttgatattttaggaaaagtgttttgtattgttgggggaattggaattaggtagtagggattttgttttttatattgattatgggaagtatttgttatagaggggttttttatttttttattattagttagttggtatttttttattttattttagttatttttttaatattattttatttatttgtttgtatagttgagggtattaaatatagagtgggtatagatttttaggttgttatgttaggtttttattttagatgggtataggtaggtaataaatggggaggttagggtatgttttattttatatatagttagagttattttttgttagtagttatttttaagggtaatggagattgtttagtatttaggtttagggggtttttttagtttttaatttttatatttttatgttgggtttaagaatttttaagtttttatttgttgtatatgttttagatttgggatttggagtaggtagggttttagtgtaattttggtttgggttttagggtttggtagggaagatggttaggtgtttttttagaaatgttagtaagtttggatgggggattttatattattgttagaagatttgagtggggggttgagtggaggatggtattggggattggttttatttttttgttttatggttggttttttgggtaagggggaagtagtagttttggttttatttttttgttttatggttggtttttttggtagtggggaagtagtagttttagttttatttttttgttggttttttgggtagtgggaggtagtagttttggttttattttttagggtttttttaaggttagttttgggttaggtgggagttattttgatttttaattttgtgatattgtatttatttaagattaggttttgtgaagttataagggtaggggtttttgtgtttgatgaaatttgtaattttttttattagttagtatatttatggtttagggttttaggtatgggaggtggttgtttttggtggggggtaggtagttggttagatttttgtttttgtttggggggatagtggagattaggtttttttgattttttttgtattttttgggttttatataattttagttttggtttttttggtattttgatgttttgggtggttttttggtaggagtgattttttatttttaattttgtttatttttaggaaggggttggagtatttttagggaaagagggtttttttttagaagtttttttggattaaatattggggttttgagaggaagttgtttttgtttggttttttttaatttattttattattattatggggattatatggatagttataggtagtttattttttttatgttttatatatgtgttttaggttatattgtgggttaggttttttaaagtggtatttatttagatatgggggttaggatttatgtgttatgggtaggattgggtgggtttttgagggttagttggtggttttttatgttttgggattgattattttttgagttattaggtgtgttagtttttttaggttattatgtttttagttttttgaatatttttttaaagtttttagtttttaggaaattgttggataaatattttgtagagatggtggtggtagtggttggtagggtgttaggtggtattgagttgtttttttatagtaaagtgagtttagtaggttttgggagtgggtgttagttgatagtggttattgtggtttttattgttgatatatttattgttttgatagttgttgggggtttatttattttttttagtatattgagtagatggttttgttgatggtagtttatgaggggtttgtaatttattttttttgtttgttaggagattgtatagtttattgtgaagggtttggtttgttaggtttttgtttgggtttgggagtatatatttttttattagtagtttttgaattttgtaaataattaggttggggtgggggtaggggaggggttatataatggaggttagttgattttatttggttggagtttttaggtttgtgggtgaaatatatttattgttttttttggtataagtttttttgagggggtataagtggttagtttgtataaggagaggtgtttgtttttgttaggtagaggattggtgttttatttgtttgggttttgtttagtttaggatttattttgtttttttagaaagtttattaggtaggtagggtgggtagggtttattatgtttattagttttttgggaaaatggagatttaggggaggtgatttttagaggtagattatgattagagagattttaggttttgttgttaaggtaggggttgtaatttgatataaattgtaaattttttatttttttttgttttattatggagtaggttttagtttgatatatatattttgggaggaatatggtgtgggtaggtggtattattatgattttgtttattttgttgaggtatagttggaggtgttggggtttttttttttgttattttagggaagtatttgggttttagttttttatttttttggggttttattgggtggggtattgggtttttttggtgttgtttttgatagattatttgggtttggatgtttttttttataggtattgtttgttatttattttttgggttggtaaaggtattttatttgttatatatttatttattgtagagtttagtatattttaagattttgtttttgtttttgttttttattttatttttggtttgttttaaataagttttatttatgttatggtttattttgtttatttaggatttttgtagatgaggttgtagtttttttttggtgttttttattttgtttttgtttattttttttataatttgtagtaggttttgttaagtgttttttatttagtgggtttttagggtttttatttttgttttttgtgtgggaggaagttgggtatggggatagtatatagtgtttgttgtgagggagggttggttatagtgttttatgtgtagatattgtttttgggaaaggaagtgggtatgggtataggttttttttggggtttggttgggggtatgtagttatgtttatagtttttttttttttttgttttttttgggtagggtttttggtggttgaagggttttagtgttggttttttaatttttgatattttaggaaaagtgttttgtattgttgggggaattggaattaggtagtagggattttgttttttatattgattatgggaagtatttgttatagaggggttttttatttttttattattttgtttttgttttaatttggagttatgtttggggtaggagggtttttagagtatggttagttgtggagggtgttttttttgattttttggtttgttgggatattgtggttttgatttttgtggttttattttatattttattaagtttgtgtagtttagtgtttttgtgttttatatttggttgttgtgtttttggttttagtttgtggggaggttagttagattttggttagttgaagggtttttttgtattttttaggtttagggagtagttatttttttgttaggtttgtttagggggtgtttttatttttgagttggataattagttgagggtttgggtaggtgggtttgttaggttatagggtatgggtggggtttgtagttattgggtttgtttggggggtgtgtgagtttaaatatagtgttttaaggattttattttaaagtttgtaatattggtagtagagttatttatgaatttttaatttttttaattttaatgtttttgaaatttaaatttattattttttaaggtttaaggaaaatatatttaaaggtggtatggtagggaagggaatttttgttggagatgaggaagtaaggggtttagggtttgtttaatagttttattttggtttggagttttagggttttttgttaatttgtttggggttttagtgttgggttgggggaatttttttttgaggttatgggattaggtataatggtttaagtagatagaagtagtaggtagttgtttatttagggtggtttggggagtaggtttagagttatagttatagttattagttttagttatgggagggtttgagggtagggtgttggttttaagttgggttgggtgtgtttaggtagaggggatgttagtgggggttgtgttagttttttttgtttagttttgtgtaggatttttaggaatttggtttgatgtaatttggttaggttttttttgagagtggaaggtgtatgggggtttaggttttagtataggaattattttatttatattttgtttatttttttgggttttagtttttttttttggagtttagttttttatagggtatttttgtttagagagggttagtgattaagaaatatataggaagaagagttgtttatttaggagttattaggtgtgggggttaaggtttagggttggggttagtagtgattttttatttttatttaaggttattttggtttttttttttgttgtttttgaagtgagaatttaataagtttttaaaataggaatttttttgatgttggtggtttttattatagttatgttatgatttttattagtttgtgttttttgttttttttttgggtaggtttagggttgttgggatttttattttttgtttagtttttttattaggagttagtatatttgtttttttatttttgtttttggtttgtttatgggggttgttttagatttttaatgtttttttaggggaggtagagtttggtattaattagtttagggtttgtgggttttatattgaagttatttagatgtagtttggggttgatttttatttgatagtttgggaaaaattgaggtttaggaggtataggtagttttggtttggagtttaaaggtttttataggttgaggggagagtttgtgggtttttttttttagggttttgttgggttttttattttggtggggtaatgagtagtttttatttgtatataaataattagttttgtggggttttttgtagtagttgttttttggagtgggtttagagttttttatagatttttttttaagggtgtttatttagtaaagttaaggttttttttaggatgaaggggagtggtttgtattttttgaggttttttattttatgtagggattttaggattagttggatggttgagtagtagttggggatgtagtgaggttttatgttgtttattaaagtgaagtaatatattggggtaggaattattttttttttgttttagtgtttttttgtagggatagttagtgttaggattttaaggtggggagagggggtgggaaggaggtttagtttaggtatttgtttggggttagagattagtttttatattttttattgggatgtttggggttaatttagtaggagtggtgagggggttgttttgaggtttggattggggggtttatgttaggtatgggtttggggtagggtatggtaaggatttagatgtttggagattggattttttgtgagttgtatggatatatggttttgtgttatttgggtttggttaggtatttagatttgtggtttggatatgttgtttatatatttaggagtgtttgttgtgtaatttatgtgttttaggtagttttttttgatttttgtttatttggttttggtttgttgggttatagtttgttgaaggtagttaggtttgtagtttttttttggttttttttggatagtgattagtttgagggagtttaggtggtgtttttgtggttggtatttatttttggtttaggtttagtttttttttgagagtttagagtattttattttgggttttagtattttggttatttgttttggtttttttttgatttatttggtttagttatgtggatggggggatgtttaggaagatagttgtgagtggataaaaataggttttaggttggggttgtattagggtagttttttatggggttaggttgtagttaggttggtgtatggttttaggagtattggggtaagtgggtaaggtgagtaagttgtttggggaaagtattttaaaagagttatatagtttttggttaaagtttggtatggagttattaaaggaaggaaaattgtaggttggaggttgagtttagttagatttgtgttttggtttaggattgattttttaaaattgttagtttttaaaaattaggagattttatataatagaataaatttttgaaaatgtaaatgtttgagtaatattgagtttattagattattaatggttagagttgagttgggttgtttatttagtgagatagttgaaataggaggggatatttggttttttgtttttataggttttattagtttttttattagtttttgtttttaatagtttaagtttattttttaggaattatttttttgttagatgtgtagatttagaggttttgtttgggtttagttataggtttatataggtttgtagttggaatttttgtgtttttatgtttggttttttttgtttttgaagtttttttgatttagagtatatatattagaataatagaaagtagtttgggttattttttagagatgatgtttattttttaaggagtaggagaaggagtttgtagatattgttattttattttttatatatagggtatatttgtttttttttattttaatgattatattatttttgaaggtattattatgttatgtgtggttagtttaagtagttgtggtgggattgttatttggggatttagttgagaattaaagtgttttaggttatggttgtggggagttttggtaaaggggataggtgtgggttagtttttgagataagtattttgatttgtaggagtaaggttgggggggagtggaatagggtgtttgtaaggggttgtggttgggtttggaggatagttattgtgtttttttttttttttttatttttagttaggtttgagtattgtgaagtatgggtggggttagtttagtatagttttgttagggataggaaggtagttagtatttttaattagtgttgtgggtggggttggttttgttaggagggtggtatagtatatttgtaagatatataggggattttagggatgggagtggtgaaatgtggtaggttttggaggataggtttttttttgtaaggagtggttggttatgtgggtggatgttatttgtttttggtaataagaggggttatgtttgttaagggtatatgttatatttatgttattttttatttttagtgtttattatattggggatggaggaggaagagttgggggtagaggtataggatttttttttttggtttgaggttaggggttagatgatagagtttagaggttgttgaggttggttggattttaatttagggttgtttataagttattttttattttattaggttttttttttattattgttttttggtgtagatggggaaattgaggtttaaggagtttaatgattttgtttttggaaagggttatggtgatagagtggttaattagggtttaaatttagttttttggatgttttattgggtttgatgttttgtttttgttaggttttttttgaaggtatgatattagtagtagtttgaaaattatttggttttgggggagtatttttgtttaggtttagttggttgatgggtgttttagtaattggggtttgggtttttgggtagttaaggttttggtattttttgggttagtttgagatttaatagtttattaataaatatatatttgttaaggataaagaagtagtggttttaggtagtagattatgtgatatagagaggaatagggttagggttggggtagggggtttttgatattaaagagggttgtgaggtgaggagaggatttttaggtataggtggtaggatttttggggaataagtaggggatagtatatggggaggggatggagaaggtaggatgtggtaggaggttttggggggaagtagagttagaagttttttaaggattataggtgtttgtagtttttttgtttttattttgaggttttgtgtgttattattggtagttgtttatttaaatattttaaatatatagttagttatatttttgatttttttagtattttattttggttatttttttattttatttttaggtttttgtggttttttaggtttgtttttttgtgagtttttatatattttataatgttttattttgtgatatttatttttgttatatttttttgtttgttttagttgtgtttggggtttttttattattagatgtgaaatttatttgttagagggtgtatgtaaagttggggggttgttggtatgagattattagaatttaggagggaataagtttggaaaaagaagttaggagagggtggattgattttgtttggggtagaagagagtgatttggttagaggatttggatttgaataggaagtttattttagtaggatagaggagtaaaatagttatttagattttattgtattttgttgagtaatggagggtgggtgaggtagaagggtttgtatagggttggaaggggtggggttatgtttttagtttttattttatttagttgttggttaggttttttgggtagtattttttttataggttgtaaggttaaatgagtgaggagggggatataggggttgggggatttggtttagttagttttgtagttttaaggtaaatatgttttgtgtttaggtggtatggattttttttatttttaaagtttaggtttgaagtaggtattaggttaagttaagtagttttgttttgtttttaggagtttttgggtagtgttttgggttgttagtgtgttagattttggaatagtttagtgtttttgttgttttttaggaaagttaggagagaggttggtagtagtttttttgtttgttagggtttatattaggaagttatttagatggttggttttgtatagggttttatttttttggtttttttgaggttgtgttttttatgttatgggaagatatggggtttaggatatttattttaggttagtttaggagttttaggggaggtagttttttttatttagtagggtataggtatttatagattttggggttattatttttatttttttttttttaggtttagttttggtagtgggtattaattttgtttgtgtagttaatttttttttataatagttatgttgtttatggtgtttgaggtttttgtgatgtttatgtgttttttttaggttggtgttttttgagtttagttggtttggttatagtttttgggagaagtaaaggaagttgaatgtgaggttatgtttggttaagggtagttttttgttttgggtgagttagagatttattgtatgtgtttgggggttttatttgtatttgtttttttaggtgggttgttatttttttaagttttttgatttttatttgtttgtttgttttttttttttttaaaatatttagggttgttaagtgttaaatttatgtaattgaatatagttttttggatttgggtttttttttattttaggtttagagtttttagtttttgttattattatttgtaatagttaggttttgagagttgttgttttgtttatttttttatttttattttttttagttgttggataaattatttttatttttaaaaggtttttttagtttttttaatttgatgtattagttgataggttgttttttttaggtagtttttttgatttttttgatttaggttggtttggttttttttaagtttttggtgatagatggttttgtttgttttttttgtttatggtgtttttatttatggattttgggatagggtatagggtttttttttgttttttagattaggaaagtaaagaaatttaaatatgaggaagataggattaggatgtaggttattggtgtaaatgggagtttagagttttttagtgtaagtttaaaaattttttgggagaaattttaggttttttttaaattatagtgtttttgttggtttgaatttggtttatttatttggttaatatgtattgggtgttttaggttttgttaggtttagtgttgggtgttggagataaagagaggtttagataagtttgttagtgaggagtatttagtttagggtggttatagatttataattatagtagttgggaggtagtaagtaagtgggggagtattggataggtttttgttttgtagtggtttattagttaatttttatttgagtatattttatttattgattttgtatggtttttttattttttttttgatggatgaatttttaggtattttttaaaatttagtttttatattattaattataggtatttttagaaagagtattttgtatgttttttttgtgagtagttttttgttatttttttagatgggtttttttgaggggaggagggttttttttgggatttttaggttaggtagagatttttgatgatttttgtggaatggattttaatatgggtttttttatagttagtttagatgttttttttttaggttatttttttggttttttgaggtaagggttggatatttataaagggttgttttgtattgattgttttaagttatatttagaatggtaggaaggtttattgttttgtgtttaatgttaggatagggaagattatattttatttaaagagggaaatgttttaagtatttagtaggatggaaagtaggttagatttgaggaaggtattgtaggattttgagggtagggttttgagttgtgtatgttttaggtatagggggttttgatgatattgagtgggtgtggtttggaggtagagggttggatttaaagatttttggatgtttttttatttttatatgggtttgagtttttttaaggtttgttgttgatagagttagatagttgtttagagttatgtgtaaaaatatatttgtgtttatatagggtggtgtatgtttgtatagaaatgtatatattaggttagtatagggttgtttgtgggggtggagggattttgattttttatagtttttgtatttgttgtttgtttttattataagtatatatttttgttattattattaagttataatttaaaaaaaaatattttgtttttgaaagggtttttttatttgtttttagaattttggtgtatgagaagtttatatagtttttgggagaggtaattggatttttattaatggattttgtttgttttttgtttggatgagggatttaaagtagttaagaagtggttatttggagtaaggttgagagatttaggagtgaatgtggggtggtttttggttgtagagtaggggtttaagtttatttgttgattaaggtagtatttagaggttgttttgataggattaagtttgttagtgttttaggatatttaatttaaggggtaagttttagttgttttttaagttttggtttttgggatgggtgggtaggatttttagggtttatttaagataggaagtagttttggggtttaggagggttatagttttttgtggttagtttgggtattttgttattatgtataattttttgtttgtgggaaatgaagtttttttttggggtttttttataaatttgaaggttggttgtggtgagtttttttttaattttggggtatttttgttggttgttttgttggtttagtgtttggggagttttatggtttgtaggggtattttgagttttagttttaggtttggtggtgtttttttttttgggttttggttttgtttggtggagtggtttttttaaggttatgagggaggttggggttggtagtttgtatttttggtgtttggtgtggggttgtttttttttggttgggtttgtgtgttttgtgttttttttgtttaggtttgtttggttattttttgtttttgtttttttattttggtggtgttgtggtttgtgttttggtttgattggttgtgaataaagtggtttggtttgtggggaggaaatttaggtttgggtggttatggtgggtggggatttattgggttgttgtgtttgggtgtgagtgtgggtttagttgggttgtggtttttggtgtttgttgttttgtatttttgtgggttggtgttgggtggggttgggttggaggttgtggtgggtgggggtgttgtttggggttgggttttgtgtgttgttgttgtttggtgtttggtgtttagtgtttggtgtttggttgtttgtttttgtttttgggttgtgttgtgtgtgttgggttagttgtttgttgtgtttggttttgttgttgttgttggtttgttttttttttgttttgtgtttgttttgtgtttggagttgtttgtttatatttgtttttgttgtttggggtgtttttattgtgtggttggtggtgagggtggagtgtgtttggggagtgtgtggttgggttgaggggtagtttttgatgatttggggtttgggttgggttgttaatggagtttggttattagttagtttgttttggggttatgttttttttggttttagtttttttgtttgtaaagtgatttggtgtttttgggtttgttttgttgtgattttagtagaaggggtttgagataggttagggatgaattttggatttttgtttttgtgtgtggggtgggggtggtttaggttgatttttaggttgttttattttggggggtgtggagggggtggttaagagtgatttaaaaggtttaattttaagattttgtgtttttgggggaagtgtgggaggatgttaggataggaggttagttggaggtgggtttttaaggagtaggaaggttttgaggggagttaattatttatttaggtattggtagttatatttataaaagggggattttgttggggagtgggagaagaggggtatattttgtttggtttttattttgagttgggagtagatattagatagaggaggagtggtgtttagggtgggttgtgatagttgatagtttagagttttttttgttgggtggatttggttagtttggatatttagtttgaagtttattgggaggtagatggtttgggtatggaatgagtaagtgggatatagattttttttttttggatatttataggagagtgtaggtgattgttattttgatttttttttagttagaagtttttttgataattgttttttttttattttagaggtttatagttgataataatttttttgtgaaagatagatttttgtgagttatttttttgaggttgttaagtattggggttgggggagtatttttatttttagttagagtgagtttagttggtagtaggggagggggtgggaggagatgtagatagaggtagtaggtttggtttagtgtttaggatagagtttgtagttaaaatttgggttttatttttgttttttggggttgattaagagaaggattttttttttttgtatgagggtatttgttttttagataggggattttttatttttgttttttgtttgagtatttttgtttttttttagtttagattttgtaattttaggaagggtttatttttagggggttaagttagaggtttagtggtttgtgttgtttgggtgggatatttgatataagggttgtttttagagtttgggtgtttggtgtttgttttttatttagtaaatttgtattatgagttatttggggttttttttgggattgttttatttgtttattgttttttgaggaagagtttttggtatttgtttattattttgggttttgttatgtaaggatggaggaaggaatttagggaggaagtagagggtaagagggttatgagataaggttagtaagtggttgaggtttggggatgtgggagggagtagggtatttttttatggaagaggtagtgatattgtgggttgtttttgaagtggttggattttttgtttattttgtattggttgtttttaaggaggttttttagtttttttagtttggtgttttggtatttgttggtgtttgtaatttattgtgggttttatattttagttttgtttttattttggtatgaattgtttttttttaaga

SEQ ID NO: 767 - DNA, 15001 bp, Artificial Sequence
  chemically treated genomic DNA (Homo sapiens)
ttttgggggagggtagtttatgttaaggtgaagataggattggagtgtggggtttatagtgggttgtaggtattagtagatgttagggtattaggttgggaagattgggaggtttttttggagatagttagtgtaaaataagtaagaggtttaattattttaagaatagtttgtaatgttattgttttttttatgagagggtgttttgtttttttttatatttttaagttttggttatttgttggttttgttttatggtttttttattttttgttttttttttgaatttttttttttatttttgtatggtagagtttaggatggtggatagatattaggaatttttttttggggagtagtgggtaggtgggatagttttagagggagttttaggtggtttatggtgtaggtttgttgggtgagagatagatattagatgtttaggttttgggggtaatttttgtgttaggtattttatttaagtggtgtagattattgggtttttgatttggttttttggaggtgggttttttttggggttataaagtttgagttgggagggagtagaggtgtttaggtgagaggtaggaatggggagttttttgtttgaggagtgagtgtttttatgtagggggagagagttttttttttggttagttttaagaggtagggatgaagtttgagttttggttgtagattttgttttgagtattgggttgaatttgttgtttttgtttgtatttttttttatttttttttttgttgttagttgaatttattttggttgaaaataaaaatgtttttttaattttaatatttagtagttttaggaaggtaatttataagagtttgttttttataaaagggttattattaattgtgggtttttggaatgggggaggggtagttgttggaggaatttttggttaggaaggggttggggtggtagttatttgtatttttttgtgagtgtttaggagaaaggggtttgtgttttatttatttattttatatttgggttatttgttttttagtggattttggattgggtgtttgggttgattaagtttatttagtagggagggttttgggttgttagttgttatagtttattttagatattgttttttttttgtttggtgtttgtttttagtttaaggtgggagttaggtaaggtgtgtttttttttttttattttttagtaaagttttttttttgtgagtgtagttgttagtatttaggtgaatggttgattttttttggagtttttttgttttttggaggtttatttttaattgattttttgttttggtatttttttgtattttttttagaggtataaggttttgggattgggttttttaggttatttttggttgttttttttatgttttttagagtggggtagtttgaaagttaatttaagttatttttgttttgtgtgtggaggtagaagtttgggatttgtttttgatttgttttgggttttttttgttagggttatggtagagtgagtttagaagtgttgggttattttatagatggggaaattgaggttagagagggtgtggttttgggatgggttggttggtggttgggttttgttagtggtttagtttaggttttaggttgttgggagttgttttttagtttggttgtgtgttttttgagtgtgttttgtttttgttgttggttgtgtggtggggatgttttgggtggtggaggtggatgtgggtgggtggttttgggtgtggggtgggtgtggggtggggagagggtgggttggtggtggtggtaggattgagtgtggtaggtggttggtttagtgtatgtagtgtggtttgaagatgggagtaggtggttgagtattgagtgttgggtattgggtattgagtggtggtggtatgtgaggtttggttttgagtagtgtttttgtttgttgtggtttttagtttggttttgtttagtgttggtttgtggggatgtggagtggtgggtgttggaggttgtggtttggttaggtttgtgtttgtgtttggatgtggtggtttggtgagtttttgtttgttgtggttgtttgggtttggattttttttttgtgggttgggttgttttgtttgtggttggttgggttggggtgtgagttgtggtgttgttagaatggaggagtgggagtaggaagtggttgagtgggtttgggtggggagggtgtggggtgtgtgggtttggttaagggagggtggttttatgttgggtgttgggggtgtaggttgttggttttagttttttttatgattttggggaggttgttttgttgggtgaggttgggatttgagagaagggatgttgttgggtttggagttggggtttggggtgtttttgtgggttgtggggttttttgggtgttgggttagtgaggtagttggtggaggtgttttggggttggagaaagatttgttgtggttggtttttaagtttgtgggagggttttggaaggagattttgttttttatggatgaaaagttgtatgtggtggtggggtatttaggttagttataaaggattgtgatttttttgggttttggaattgttttttgttttgggtgggttttggaggttttgtttgtttattttagaggttaaggtttggagggtagttggggtttgttttttagattgagtattttggggtgttagtgagtttggttttgttgggatggtttttgagtgttgttttggttagtgggtgagtttgggtttttgttttgtagttagaggttgttttatatttatttttgggttttttggttttgttttaggtggttattttttgattgttttgagttttttatttgagtgaagggtggatggagtttgttggtgggggtttggttgttttttttgggagttgtgtagattttttatatattagggttttggaggtagatggaggagtttttttgaaaatagagtatttttttttaagttgtgatttaataatagtagtaagaatatgtgtttatggtaaaggtaggtggtaggtatggaggttgtgggaagttggggtttttttgtttttataggtagttttgtgttggtttggtgtatatgtttttgtgtagatgtatattattttgtgtgagtatagatgtatttttatatatggttttggatagttgtttgattttgttagtagtaggttttggaggggtttaggtttgtgtgggggtggggggatatttagaggtttttgagtttagttttttgtttttaggttatgtttatttagtgttgttagagttttttgtgtttgaggtgtgtgtggtttggagttttgtttttggagttttgtggtgttttttttgagtttggtttgttttttattttgttaagtatttggggtatttttttttttgggtaaggtgtggttttttttgttttggtattagatataaggtagtgggtttttttgttattttaagtgtagtttaagataattagtgtaaagtaattttttgtgggtgtttagtttttgttttgggaggttagaaaggtggtttggggggagagtgtttaagttggttgtggaaagatttatgttgggatttattttatagaggttgttaggggtttttgtttggtttggaggttttagagaggatttttttttttttaggaaggtttatttggaagggtagtagaggattgtttataggaagagtatgtgaagtgttttttttggggatgtttgtagttggtgatgtgggaattgggttttgagggatgtttaggagtttatttattagaggggaaatgaggaagttatgtaggattaatggataaagtgtgtttaggtgagggttggttggtgggttgttgtagggtgggggtttgtttagtgtttttttatttatttgttgttttttgattgttgtaattatgggtttgtaattattttggattgggtgttttttattgatggatttgtttgaatttttttttgtttttagtgtttagtattgggtttggtaaaatttgagatgtttggtatatgttggttaaatgaatgaattagatttagattggtaggggtgttgtggtttaggaggggtttggggttttttttaggaggtttttgggtttgtgttggagggttttggatttttgtttgtgttagtggtttgtattttggttttgttttttttatgtttgaatttttttgtttttttagtttggggagtagggaggagttttgtgttttgttttaggatttatgggtaggaatattatggatagggagagtaaatggggttatttgttattaggggtttagggaaggttgagttagtttgggttaaagaagttaaaggggttgtttggaggaggtagtttgttagttggtgtattaggttagggaggttgggaaggttttttggggatgggggtgatttgtttaatggttgggggaggtgggaatggggaggtgagtaaggtagtagtttttagggtttggttgttgtgggtggtggtggtaggggttggaggttttaagtttagaataaggagaggtttaggtttagggaattgtgtttaattatatggatttgatatttggtagttttgagtgttttggggagagggaaggtaggtgggtagatgggggttagagagtttagagggatggtagtttatttgggaaggtaggtgtgggtggagtttttaggtatgtgtagtgggtttttggtttatttagggtgaggagttgtttttagttaggtgtggttttatatttagttttttttgttttttttagaggttgtggttaggttagttgggtttggggagtgttagtttgagaggagtgtgtgagtgttgtgggagttttgggtattatgagtgatgtggttattgtgaaggagggttggttgtataaatgaggttagtatttgttgttagggttgggtttggggagggagagatgggggtagtagttttagggtttgtgagtgtttgtgttttgttgggtgggaggggttgttttttttggggtttttgggttggtttagggtgagtgttttgggttttatgtttttttatggtatggagggtatggttttggggaggttaggaggatgaggttttgtgtagggttggttatttgagtggttttttggtgtgggttttggtaggtgggggagttgttgttagttttttttttggtttttttggaaggtagtgaggatattgggttgttttagggtttggtatgttggtggtttagggtattgtttaagggtttttgagggtagggtagggttgtttggtttggtttggtgtttgttttaggtttgagttttgggggtggggggaatttgtattgtttgggtatagggtatgtttgttttggagttgtagagttggttgagttaagttttttagtttttgtgtttttttttttatttatttggttttgtagtttatggaggaggtgttgtttgaggggtttggttagtagttgggtgggatgggagttggggatatagttttattttttttaattttgtgtaggtttttttgttttatttattttttgttgtttagtggggtgtggtggagtttgggtggttgttttgtttttttgttttgttagggtgggttttttgtttaggtttaggttttttggttaagttatttttttttgttttaggtggaattggtttgtttttttttgatttttttttttagatttgtttttttttaagttttagtgattttatgttagtagttttttggttttatgtatattttttagtagatgggttttatatttggtagtggggagattttaaatatagttggagtagatagggaggtgtggtaaaagtaggtgttataagatggggtattgtgggatgtataggagtttatagaagagtaggtttaaggagttataggagtttgggggtggggtgaaggagtgattgagatgagatgttgggggaattaggggtgtggttggttgtgtgtttggagtgtttgagtgggtagttattagtgatggtatgtggggttttgagatgaagataaggaggttgtagatgtttgtggtttttggggagtttttggttttgtttttttttaaggttttttgttgtattttgttttttttattttttttttgtgtgttgttttttgtttgttttttaggagttttgttatttgtgtttggaggttttttttttattttatagttttttttggtgttagggattttttgttttgattttggttttgtttttttttgtgttatatagtttgttgtttggggttgttgtttttttatttttggtaaatgtgtgtttgttgatagattgttggattttgggttgatttaggagatgttagggttttgattgtttaggggtttaggttttagttattggggtatttattagttagttgggtttaggtaggagtgtttttttgaggttaggtgatttttaggttgttgttgatgttgtgtttttaggaggggtttggtagggataggatattaggtttagtggggtgtttagagagttgagtttgaattttggttagttattttattgttatgattttttttaagagtaaggttattgagttttttgggttttagtttttttatttatattagggagtggtggtgggagagagatttggtggagtggagaatggtttgtgggtggttttgagttggggtttggttagttttagtagtttttgggttttgttatttggtttttagttttaggttaggagagagggttttgtatttttatttttggtttttttttttttatttttagtgtagtgggtgttgaggatgggaggtggtgtggatatgatatatgtttttggtaggtatagttttttttgttgttgagagtaggtggtgtttatttgtatggttggttgttttttgtggaggaaagtttgttttttggggtttgttgtattttgttatttttgtttttggggttttttgtgtgttttgtagatgtgttgtgttatttttttggtagggttagttttatttgtaatattggttagaggtattagttgtttttttgtttttagtagggttgtgttgggttgattttatttgtgttttatagtgtttaggtttggttgggggtggggagggagggagggatgtagtgattgttttttaggtttggttgtagttttttgtagatgttttgttttatttttttttagttttgtttttgtaggttagggtgtttgttttagaggttggtttgtatttgttttttttgttgggattttttatgattgtggtttggggtattttggtttttagttgaatttttaggtgatagttttattatggttatttgggttggttatatgtggtgtgatggtgtttttaggggtgatgtggttattgagatgagaggggatgggtatgttttgtgtgtgaggggtggggtggtagtgtttgtaggtttttttttttgttttttgggaggtgagtgttatttttgggaagtggtttaggttgttttttgttgttttgatgtgtgtgttttgagttagaggagttttagggatagaagggattgggtatggggatataggagttttggttgtaggtttgtgtggatttgtggttggatttaggtgaggtttttgggtttgtatatttaatagggagatggtttttggagggtgagtttaggttgttaagggtaggagttagtgaggaggttggtggggtttatagggatagggggttagatgtttttttttgttttggttgttttattggataagtagtttagtttagttttggttattggtggtttggtgggtttagtgttgtttagatgtttgtatttttaaagatttgttttgttgtgtgaagttttttgatttttgaaggttgataattttaaaaaattaattttgggttagggtgtaggtttggttgaatttggtttttagtttgtagtttttttttttttgatagttttgtgttaggttttggttagaggttgtgtggtttttttgaggtattttttttaaatagtttgtttattttgtttgtttgttttagtatttttggggttgtgtattagtttggttgtagtttagttttgtggagagttgttttggtgtagttttggtttggagtttgtttttgtttatttgtggttgtttttttgagtgtttttttgtttatatggttggattaagtgggttaggagagggttgaggtgggtggttgggatgttgggatttaggatgaggtgttttgggtttttgagaaagggttgggtttaggttaggagtgggtgttggttgtaggggtattatttggatttttttaggttggttgttgtttgagaggggttggggaagagttgtaggtttggttgtttttggtaggttgtgatttagtaggttaaggttgagtgggtgggggttgagggaagttgtttggggtgtgtgggttatgtggtagatgtttttgagtgtgtgggtagtgtgtttaagttatggatttgggtgtttggttgggtttgggtgatatgggattgtgtgtttatgtggtttatggagggtttagtttttggatatttgagtttttgttatgttttattttgggtttatgtttggtatagattttttagtttaggttttagggtagtttttttattatttttgttgagttagttttaggtgttttggtggggagtatggaggttggtttttgattttaagtaggtgtttaggttgggttttttttttattttttttttttgttttgaagttttggtattggttgtttttgtgggggggtattgaggtagggagagagtggtttttattttagtgtgttattttgttttggtgagtgatatagaattttattgtatttttagttgttgtttagttatttagttggttttggggtttttgtgtgaggtgggggattttagagggtataggttatttttttttattttggaggaggttttggttttgttgagtaaatatttttgagaagaggtttgtgggggattttgagtttattttagagagtagttgttgtggagggttttgtagggttaattgtttgtgtgtagatggaggttgtttattattttgttaggatgaggggtttagtaggattttgagggagggagtttgtagattttttttttagtttgtgggaatttttgggttttaggttagggttgtttgtgttttttgggttttagttttttttaggttgttaggtgagggttaattttaggttgtgtttaggtggttttagtgtgagatttgtgggttttgggttggttagtgttaagttttgttttttttgggggagtgttgagggtttggaatggtttttgtgggtaggttagggatagagatggggaggtaagtgtgttggtttttggtgggagggttgggtagagagtgggggttttaatagttttgggtttatttgggagaggggtaggaggtataggttggtggaggttatggtatggttgtggtggaggttgttagtattagggaggtttttgttttgggagtttgttgagtttttattttaaaaataataaaagaggaagttgaggtggttttgagtgggggtgaggggttattgttggttttagttttggattttagtttttatgtttggtggtttttgagtggatagtttttttttttgtgtgttttttggttattggttttttttgggtagggatgttttgtggggggttggattttgggaagggaaattgaggtttaggagagtggatagaatgtgggtggaatgatttttgtgttggggtttagatttttgtatattttttatttttaggagaagtttggttgggttgtattaggttgggtttttagaagttttgtatgaggttgagtggagggaattggtgtggtttttgttggtgttttttttgtttgggtatatttggtttggtttggggttagtattttgtttttgggtttttttatagttgagattggtggttgtggttgtggttttgggtttgttttttaggttattttgggtgggtagttgtttgttgtttttgtttgtttggattattgtgtttagttttatggttttaggagaaggtttttttagtttagtgttggggttttgggtaggttggtagagggttttggggttttaggttaggatggggttgttaggtgaattttaggttttttatttttttatttttaatgggagtttttttttttgttatgttgtttttaggtgtgttttttttgaattttaaggaatgataggtttggattttagaaatgttggaattgagggggttgggagtttatgggtgattttgttgttaatgttgtgggttttggggtgggatttttggggtgttgtgtttgggtttatatattttttaggtgggtttggtgattgtagattttatttatattttgtaatttggtgggtttatttgtttaggtttttagttggttgtttagtttaggggtggagatattttttgggtaggtttggtggggaggtggttgttttttgggtttggagaatgtagagaggttttttggttggttagggtttggttggtttttttatagattggggttaggggtatagtagttaggtgtagggtgtggagatgttgagttgtataagtttggtgaggtgtggggtgaggttatgggggttagggttataatgttttagtaggttgggggattagaaggagtattttttatagttggttgtgttttgggggtttttttgttttaggtgtggttttaagttggggtagaaataagatggtggggagatggaaggtttttttgtggtgggtgttttttatggttggtgtggaggatgaggtttttattgtttggttttagtttttttagtaatgtagggtattttttttggggtgttagggattgagaggttagtattggagttttttaattgttaggggttttgtttaagagagatgggaggagggaggggttgtgggtatggttgtgtgtttttggttgagttttggaaggagtttgtgtttgtgtttatttttttttttgagggtagtgtttatatgtgggatattgtggttagtttttttttgtagtaggtattgtgtgttgtttttatgtttagtttttttttatgtagggagtgagggtgagggttttgggaatttattgggtggagggtatttggtaaagtttgttgtaagttatggggagagtgggtgggggtagagtaggaggtgttagggaggggttgtagttttatttgtaggggttttgagtaggtagggtgggttatgatatgggtggggtttgtttggggtagattaaaaatgaggtgggggatagggatagggatagggttttgggatgtgttgggttttgtgatggatgggtgtgtggtaggtggggtgtttttgttggtttgaggggtgggtgatgggtagtgtttgtgggggaggatatttaggtttaggtggtttgttaggggtagtattagggaggtttagtattttatttagtagagttttaggagaatggaaagttgagatttaggtgtttttttggagtggtaggaagagaggttttagtgtttttggttgtgttttagtgaggtggatggggttatggtggtgttgtttgtttgtattatgttttttttggggtgtgtgtgttgggttgaggtttgttttatggtggagtggaaggaggtgaagaatttgtagtttgtgttaagttataatttttgttttggtggtaggatttggggtttttttggttatgatttgtttttgagggttattttttttaagtttttgtttttttagggagttgatgggtatgatgagttttgtttgttttgtttgtttggtgggttttttgggagagtagaatgggttttgggttgggtgaggtttaggtaggtggagtgttagttttttgtttggtgggaatagatatttttttttgtgtagattggttatttgtgtttttttagaagggtttgtgttgggaggagtagtggatgtattttatttatagatttgggggttttagttaagtggggttagttggtttttgttgtgtggttttttttttgtttttattttagtttggttgtttatagggtttgagggttgttggtaaaggggtgtgtatttttgggtttgggtagaggtttggtaggttgggttttttgtggtgagttgtgtggttttttggtaggtggggagggtgggttgtgggttttttatgggttgttgttagtggagttgtttgtttaatgtgttggagaaggtaaatgggtttttggtagttgttggggtgatggatgtgttggtagtggggattatggtggttgttgttagttggtgtttgtttttagggtttgttgggtttattttgttgtggagaagtagtttggtgttgtttggtattttgttagttgttgttattattgtttttgtgaagtgtttatttagtagttttttgagaattggggattttgagagaatgtttagggagttgaggatgtggtggtttaggggggttgatatatttggtggtttaggaggtggttagttttgggatgtggagggttattagttggtttttaggggtttatttagttttgtttatggtgtgtgggttttggtttttatgtttaagtgggtgttgttttggggggtttgatttatagtgtggtttgggatatgtgtgtgaggtgtggagagggtgggttgtttgtgattgtttatgtggtttttgtggtggtggtggggtgggttgggggaggttaggtaggagtagtttttttttagaattttggtatttggtttaggaggatttttgggaaggaattttttttttttgggggtgttttagtttttttttggggatgagtggggttggggatggaaggttatttttgttggagggttatttgggatattgggatgttagagggattagggttggggttgtgtggggtttaggaggtgtaggaggagttgagggagtttggtttttgttgtttttttgggtagggataggagtttggttaattgtttattttttattgagggtagttattttttatgtttggagttttgggttatggatgtgttggttggtggggagggttatgggttttattaggtataggagtttttgtttttgtggttttataggatttggttttggataggtgtagtgttatagggttaagggttagggtggtttttatttggtttagggttggttttgagagaattttgaagggtgggattggagttgttgttttttattgtttagggggttagtaggagggtgagattggaattgttgtttttttgttgttgagggaattggttatggggtaggagggtgggattggagttgttgttttttttttgtttaggggattagttatggggtaggaaggtgggattagtttttagtgttgttttttatttggttttttatttaggttttttggtagtggtgtggggttttttatttggatttgttgatatttttgaaggggtatttagttgttttttttgttagattttgaggtttaggttggggttgtattgggattttgtttgttttaggttttgggtttgaaatatgtgtagtgggtggggatttgggggtttttgagtttagtatgggggtgtgagagttagggattgaagaggttttttgggtttgaatgttgggtggtttttattgtttttgggagtggttgttggtaggagatgattttggttgtgtgtggggtggggtgtgttttggtttttttatttgttgtttgtttgtatttgtttggagtgagggtttggtgtggtaatttgggggtttgtgtttattttgtgtttggtgtttttagttgtgtaggtaggtgggtggggtggtgttgggggggtgattggggtggggtggggggatgttagttggttgatggtggggagatggaaggtttttttgtggtgggtgttttttatggttggtgtggaggatgaggtttttattgtttggttttagtttttttagtaatgtagggtattttttttggggtgttagggattgagaggttattttttaagtggattgtatttttgttttgagtggggggtatttgaggattataatagggtggggaatttaagttaagttttggatgataggttttagtttttttggggatttttaggatagtgaaggagaagattttatgtgggttggtttttttgtgtgaggggtttgggagggtagttttggttgatgtgtttgtgtttttatttttttgagggatttggagtaggtaggtgtaggtttgtaggtgttttgtggttatgaggatagtgatgttgggttttgggtggttgttttttttatttgttttgttttgtgttattttagttttggattagggagtagtggggttttgttgtatttgttgttggggttggttgtttatttagtattttgtttgggttgaatttgttaagatgtgtgttatggttttggttgtagttggtatttttttaagtgattttttagttgattttttaggtgagagatgaagaaagagaattgtgtgtttttggattttttattttgggtttttggggattttgttttttttttggaggggtttgtgtgttgggttgggatgttgaagataaaggttatgtgaggtttttttatttatatttgttttttggggtaggttttgattgttgtttgttttttgggtttgtggggttaggtgaggggaaggtattgaaagtttagggtttatttgggtttttgtttattttaggattttttaggaatgtttggggttgggtatttgtttttttttattttttatgtttggtaagtgttgtttttgggtttg

SEQ ID NO: 768 - DNA, 4000 bp, Artificial Sequence
  chemically treated genomic DNA (Homo sapiens)
tttttttattttaaagaagagagaggttttttttattttttagaagatagaggtttgggaagttgagagagagagagagagataaagagagagagagagagatagagatagagatagagatattaggttttttattttttggtttagtgggtttatatattaattgtttggaagttttattttaagtttaattggaagtttgattgtttgtattttgttgtagttttttttgggaaggggttttgggtttttttatattttttttttagatttttaggttttttttgatttggggagggaagtttttagatgatagagttattttagggaaggaggggggttttttttaggtattttggatgatagtaggatgggatttgtagattaaaatgagagtggggtttttgatttatatgagtgagtggggggtgttggggatggagttttagattttttggtagaagggaagggtattttatttgagggaggaggtagttgttgttttagtttgtttaggtgttgggggtgttttgaggtattggtttgttttttttgtgttttgttgggttgggggtgaagtttgatttaggtttgtgggtaggtggggatttgttgggttgggttgggttaggttgggtttggtaggatgtagttttaaagtggtggggtggggtggggttgggttaggtggttgtgggggttttgggggtggtggttggggttggttgggattagtagtttgggggtttaggtgtgttttgggatttggtagatagttgggttttttgtttttggtttggggttttaggatagtgttggttttatttttttttgtgttttaatatgggtggtggggagagattttgggggttggtttgtgtttagttttgtttgtggatttttgtttgttgttatggtgattaggttttgttttttggttgtgttttttgttgttgggttaatggaatattttttaagttgtttgtttttgtggttttttgtaggtattgtgggtggaattattgtttgaggggagaggatggtggttggaggttgttgtggttgggtgggttttaagtatttgggtttttgtgggggtttgtatgtttaggttttttttttgaggtgtaggatgtggtgggatttagggtggggtgtatggttttgtaggatttgagtgatggagatagggttgggtttttttttttggggttgttgttatattttttgtttttgtgttttttttttagtttgtttttaaggaagggagtggggttgggtgattgtgttttagttgttgggttgggtttaggttttaggagttgatatggtgttgggtaaagtttagggttaataggggagggttttaggatgggggatagagaatatagatgattaagaggttattattgagggggagtagtagttgtggaagatttagtagttttggtgtgtgggatttttaaggttttttttttatatgttaattgagtatttttttattgttttttttgttttgaagatgtgtttggttttttttaatttttttttttatttgggttagtagatgattttagtggtttttaatttttggtagatatgtttttattttttatttggtatattttatttgttttagtgtattttaggttgtttattagttttttgtatatttagattttttttaatgttttttttttgtttatgggagagttttagattttggatttagtttttatgagtttttggatttttatttattttttgtaatttaatgggttatgtagttttatttatttattttttttgatttttttttttttttgttttgtgaaaattttagttttgtatttttttgagtttgggatttttagttaatttttgggttaggtgtttttttaatttttttgatttatagtgtttaatttttatttttgttttttggggttttttaatggattgttagtttttttattttttttgtattttgggtattttaggggtttttttgtatatattgggatttttattttatttgttgtgtattaggttttggtatttgttttagtggattttagggaaattatttttttttttgaaattttttatttatgtgtttgggttttttagtatttttttttatgtgtattttgaggttttttgagtttttttttttgtagttttgttgagttatttggtttgtggttgttgtttataaggatatgtgttttttgatagtgatgtgagttgttttttttttttttttatgtttgaggaggggggtgtgggggtttggttttggtgatggttaattggagtgtatttttgtggttgattagtgtggtataaaggtgtgtggtttaggttgagtggttgggattttgagagtggttaggttagttttggagttagtagggagttgggagttgggggaaatgatgttaggaaagttattgtgttagagagggtgatgggggtttgggaagtttgatagggtttttgtgtatagttgttggttggttgttatttgtttgtgttagtttttgagaatgtgtgattaggtatttagtttggttattgtagtggagagtttgttgtttgttgtagtgaggtttggagtggttttgtagggattttttttagattgtttgggttgtttggatgtgtattaaaatggaatagtttttttattatgatgatttatatatagttatgggatatggttgggtttttggtggtttttttttatatgattataaatttttgaaattgagtttggtggttaatttggttgatttttattggagttttaaagtgtttggggtttgtggatttggtttagagggtggtggtggtggtagttatttttttggttagggtttggatattggtgtgttttttaagtttgtttttttggagttggaatgtttgattgtttttaatagtaatggtgtgattatgatgatgtttatatttttgggatagtatttttatttttgtgggggtggtagtggtggaggtgtagggggtgtagggggtggtgttattgaggagtaggagggttttgttgatggttttgttaaagttttggatgatttgtataagatgaattatgtgatattttttaatgtgtttttgggtgttattggggggtttttggttgggtttgggggtgtttatgttggtttggagttattttttgtttatattaattttagtagttattttttagtttttgtgtttttgggaggtgttggggttgttgttgggattgggagtttgtatttgatgattattattagttattttttatatgtgttgttttttgttggtggttatttggtgtagttgggtttgggttgtggtgtttttatttttaaggaggaattgtagattgtgttggaggtgtgtagttgggatgttatgttgttggtgttttttattaatatggaagattaagagtgtattaaagtggagtgtaagtggttgtggaattggttggtggttattaagtgttggaagtggaagttggagtgtattgtgtgtttggaggataaggtgaagatgtttaaggttgagaatgtggggttgttgagtattgttggttttttttgggagtaggtggtttagtttaaatagaaggttatgatttatgttagtaatggttgttagttgttgtttggggttaagggatatgttttttgaatgttttttgtttttttatggatatttttttgtttggatggttgggtatatgttttttattggggtttagggagtaggtggtgggtatttattttgggatttaggggtgttgtaaattatattggattttggtttttttattttgtgtttagtttttttattttgatgtttataagtttttttttttatttttttttgtatgttttttttttgttggaaatagatttgatttatattgaatataatatatttgtgtatttaatagggaggggaagagggggtgattgtggtggag

SEQ ID NO: 769 - DNA, 4000 bp, Artificial Sequence
  chemically treated genomic DNA (Homo sapiens)
ttttgttgtgattgttttttttttttttttttgttaaatatataaatatattatatttaatatgaattgagtttgtttttagtagaaaaaaaatatataaaaaaaagtggaagggggggtttgtaaatgttgaggtggaaggattgggtgtagggtaggagggttggagtttagtgtggtttgtggtgtttttaggttttagggtgggtgtttattgtttgttttttggattttagtgggaggtgtgtgtttagttgtttaagtgagggggtgtttgtaaaggggtaggggatgtttagaaggtgtgttttttgattttaagtagtagttgatagttgttgttgatgtgggttatgattttttgtttgagttgggttatttgtttttggaggaggttggtggtatttgatagttttgtgtttttggttttgagtgtttttattttgttttttaggtgtgtgatgtgttttagtttttgtttttggtatttggtggttgttagttggttttgtagttgtttgtgttttattttgatgtgtttttggttttttatgttgatgggggatattggtggtgtggtgttttggttgtgtgtttttggtatggtttgtggtttttttttgaaggtggaggtgttgtggtttaagtttagttgtgttgggtggttattggtgaagggtggtgtgtgtgggaggtagttgatggtggttgttgggtatgagtttttggttttgatggtagttttggtgttttttgaggatgtagaggttggggagtagttgttgaggttggtgtaaatgggaggtggttttgggttggtgtagatgtttttgggtttagttgggggttttttggtagtgtttagggatatgttggggggtgttatgtggtttattttgtgtagattgtttagggttttgataaagttgttggtgaagtttttttgttttttggtgatgttgttttttgtgttttttgtatttttattgttgttatttttgtgggggtaaaagtattgttttgggggtgtaggtgttgttgtgattatgttgttgttgttggggataattaggtgttttagttttgaagaggtgagtttgagagatgtgttggtgtttgagttttgattagaaaagtagttgttgttattgttgttttttgggttgggtttgtgagttttaggtgttttgagattttggtaggggttggttaggttgattgttaggtttggttttaggagtttgtagttgtgtagagagaggttattaggggtttggttgtattttgtagttgtgtatgagttgttgtggtagaagggttgttttattttagtgtatatttgggtggtttaggtggtttggggagggtttttgtggggttgttttgggttttgttgtagtgagtggtgagttttttgttgtggtgattggattgggtgtttggttgtgtgtttttgggggttggtgtgggtgggtagtagttagttggtagttgtgtgtaaaagttttgttaggttttttgagtttttgttgttttttttggtgtgatagtttttttggtgttgttttttttagtttttagttttttgttggttttgaggttggtttggttgtttttaaggttttagttgtttagtttgagttatatgtttttatattgtgttagttagttatggaagtgtgttttgattggttgttgttggagttgggtttttgtgtttttttttttgagtgtggggaaggggaggaggtggtttgtgttattgttaggaagtgtgtgtttttgtaaatagtggttatgggttgggtggtttggtggggttgtagggggaggggtttaaaggattttggggtatgtatggaaggaggtgttggggggtttaggtatatgagtgaggggttttagggaggaggatgatttttttggagtttattgggataaatattaggatttggtatgtagtaagtggggtgagggttttagtatgtgtgaagaaatttttgaggtatttagaatatgagaggggtaggaggattgataatttattgggagattttaaaaagtagaaatgagggttaagtattgtaaattgggagggttaaggagatatttgatttaggaattgattgggggttttgggtttagaaggatgtgggattggaatttttataggatggaggaggggagagattaaaaggggtgagtgggtggagttgtatgatttattaaattgtaagaaatgagtaggggtttaggagtttatgggagttgagtttagagtttgaggtttttttgtaagtgggaaggaggtattaggggaagtttagatatgtagaaagttagtaagtggtttggggtatattgaggtaggtaaaatatgttaggtagaagatggagatatgtttgttagaaattggggattattggggttatttgttagtttggatgaaggagagagttagaaggggttggatatatttttggagtagagaagataataagagggtatttagttgatatgtgaggagggggttttgagggttttgtgtattaggattgttggattttttatgattgttgtttttttttgatggtaattttttagttatttgtattttttgttttttattttaaaatttttttttattgattttgggttttgtttaatattgtgttggtttttagagtttggatttagtttgatggttggggtgtggttgtttaattttatttttttttttagaaataggttggggaaagagtgtagaggtaggaagtgtggtaatagttttgggggaaggagtttggttttgtttttgttatttggattttatgggattgtgtgttttgttttgggttttgttgtattttgtgttttggaagaggaatttgggtgtgtgagtttttgtggaggtttgggtgtttggagtttgtttagttgtggtagtttttagttattattttttttttttaagtaatggttttgtttgtggtgtttgtaggggattgtggaggtaggtggtttggggagtgttttattggtttgatggtgggggatgtagttgaggagtggggtttggttgttatggtaataggtgggagtttgtgggtaggattgagtgtgggttggtttttgaagtttttttttgttgtttatattagggtataggaagaggtgggattagtgttgttttggggttttgagttagaagtggggaatttgattatttgttaggttttagggtgtgtttgggtttttagattgttagttttgattagttttgattgttgtttttggggtttttatggttgtttggtttggttttgttttattttgttgttttggggttgtgttttgttaggtttggtttggtttaatttagtttggtaggtttttgtttgtttgtgggtttgggttggattttgtttttggtttgatggggtgtggagagggtgggttgatgttttgaggtgtttttggtgtttgggtgggttggaatggtggttgtttttttttttgggtggggtgttttttttttttgttaggagatttggagttttgtttttaatattttttatttatttatgtgagttaggggttttatttttgttttagtttgtaggttttattttattattatttagaatatttagagggagtttttttttttttttagagtagttttgttatttgagagtttttttttttgagttagagaagatttgaaaatttaaggggagaatatgagggaatttagagtttttttttgggaagggttgtggtgaggtgtagatggttaggtttttagttagatttaaggtgggatttttgagtagttagtgtgtgaatttattagattaagaggtgagaagtttagtgtttttgtttttgtttttgtttttttttttttttttttgttttttttttttttttttagttttttaggtttttgttttttggaggatgaagagagttttttttttttttagggtagaaaga

SEQ ID NO: 770 - DNA, 6000 bp, Artificial Sequence
  chemically treated genomic DNA (Homo sapiens)
tggattttgaagaataaggtgaggtagttagggataggggttgagtttttttggtaggggttatagtttagtaaaagtttagaggggtagttaaaaataaagagtgttttaaatgtttaataatggaattattgtgttggttatatttttttgagaattttagttgttgagttaggtttttgaagttggtagtggttttaggtgggaagttgtatttgtgtttgtagaatttttatttgtttaagttgttttttttttgataagagtatgtagggtatgaatgagaaagagattttatatgtgttgagtgggtattattttattttatttttatatgtgttttttgggggttgtgatatttttagtttattttgtaggttggtatattgaggttttttatattatttgtaaagtggtagagttgagatttgaatttgggtttggtttaaaatttgtgtttttaagttttttgttattttagtttttgaaaagtttagaattttttgttgaatttttggggatgagtttagtgatgtgtttgtatatattgaataattagttttttggaagaaaaaagaggtttgattggtagtgtattttgatgtttaaggggtaaatatttttattgtggttgatatggagttattagtgtgatatttttgaatatggagttgggaagagatgagtatagttggtttttgtaagtaggtaagggttagttttagtgtgttattgggtaaatgtttttgttttttttttgagtttagtatggttagtaaaggtttttagatatgtttaaggaatggaagagggttgagaaatttgtttttttagttgggggtttgttttgagttttgggaagttgtggttaatttttaagttagttttgtaaataagtgtggttattttattagtttaggttggtttttgttgttgattggttgtggtattttaagtagttttttttttttttagttttagtttattattgtaagagttattatttatttagtataatttgattatttttatattggttagttttaatttttttaggaattttttgtggttatgtttattttggttttataggtgagggggttgggttgggaagttgattgatttgtttattttatagtagaggggtagttagtttagatgtgaatttagattagtgtagagtaaggttttgtttatttttggttttttggaaggtatgttgtatttagaggtttttgttttttatattttagggtgttttttttagttttttttagtagggatttttgtttagggaatagaagtttgatttgtttgggttttaattttttatttgtgaaatgggagaatttttaaagaaggaatatggaggtaggtgtgatatttaaagttggatttaggtttatttttttttgtgttaggattttaggataggtaaggagttaagggtggggtgtttagttttaaaaggatagttttggagtttgtgttagggggtaagaggggagtttttgtggtttaaagtagtatttttttaatgttttgtttttttgttatattttttgttttggtttagaggtatttagtttttttatttatttggaagtgtgattgttatttagatgttttggttagttttttttaagtagtaataattagaattaggggatttttgatgggttgttagggatgttttgtttttatgtatttaaaatgaatttgtaattattaaaataaatgttgtttttttttattttgttttttttgttttagtttttattttgagaaatttaggttaaggttaaagtttaaggtttggtttttgttagtgttttagtttttttatttgtaaagtggggtgattttttgttgtttaggttaggtggtggttaggattaaattttgaagttgatttgagtagtttagtatggtgtttggtttagagtgggtgttttatgtttgttgatattattattaattgtgattttgggagaggtggatttggggtgtagaaggtgggtgggttggggagggtattttggtttgggggtggatggggtttgtggggtgtggtgttttggtggagtgggaggtggggtttttgtgtttggtgtttttattttgtttggatttttagtttgggttgtttttgggttttttttgggttattggtggggaatttgtttttgtgtgttttttttttttttttttttttggttgtttgttgggtttttttttttagtttgtgtgtttttttttttttttttttttttttgggttgttgttgtttttttttttttttttttttttttttttttgatttgttttttttggtttggaatttattttggtttgggagttggagtggttaggttgttgtttgtttgttttgttggatgttttgtggtttgtttttttgtgtgtttgtttgttggtgagtttgtttgtttgttggtttaggtgagtgttttttgtttttttgtggattttttgttttggttagtgtgggggagtttttgttttggattattttggtgttggattgtgggttggtggggatttttgtttatttttttaatttttattttttttttgggttaagttgtgatatttaagtgttgggtgggtgtatggggttatgtttggtgtggttttttgttgtgatgtagtggggggagggggttgggtggggggggtgtagggtttttggttgtgtggggattttttttagtttatgttttttataggattttttagagaagttagtgagttgggttttagtttttgggttaggtttaggttaaatttgaaatttgagttagttggtgttgtttttgtttgggttgtttggttttgtgttttttggttttgggtgggaggtggggggattggtagggtgggttgaggggttttggggttagggtgttaggttgaattgttaggatttttttgtttttgtggggttttgggtagggtttggtgttgttggtttggaagggattgggttagattgtgtttggttttttttgtttatagtttttagttttgtttttgagtaggtttagttattagttggtttagaagttggtaaaagttttgggggttggttattgggttaggtttatttgtttgtttgggttgggattggggtgggtttgagtttttattagggttgttatttgttttgttgtgtgtttttagataattgtttgtttttttgagttgggttttttattggtggtaggtgggtttggttggaattgttaggttggtggaaggatggggtgaatagaaggggtttatttgtgtggtatttttttagtttttgtgttttttaggtggatttaggagtggatagagtttgtgtgtgtttttgggtaagattttttgaattttatggattttgtataatttggggtagtggttgttgggttatttggggtaagtttaggtttagttatagttatagtgtagttgggattagatttggttttaagggtgggttaggttggttttgttgtagattttttttttagttttttggttgggggattaaggtattgagtttttttgttttatttagtgatttgggttaagagattgtttttttaagtttttatatgtgaaatgagaatttttaggtgaagattttaagtgtttttgtaggtagaggtttggtgtgtagtagatgtttaataaatgaattgtttattggatatattggttgagaaagatgggtgagatgtgaggttgttggttagtttattttagaagaggatgggttggtgttttgagaaagaaatagttttggtattgttttgttagttagtagttgggtgattgtaagtaatttattttttttttttggttttagttttgttatatataaaattgggttagtggtaatgatagttgttaatatttattgaatattttttaggaggtatagatttttgtttatttttattttgttgatggggaaattgaggttaagagaggggaagtgatttgattaaggttttatagttggaagttggaatgaaagtttagattttagagattatagtttggttgtttttgtatttttttagtgatggggtagtggaggtttgtaagataggattgtatatatagtagtgttggaaaagattgttttgttgagggattgaatgaaagttatgaggtttttttggtgatgtggtgatgtggtttttttatttaaggaaatgatttatagtgtgttattttttttagttgattgtttgtttaggtttttttgtgtgtttttgggtttttgtttttaaattgtgttttttttagagtgtttttttttttaggtgttgtttatttgtttttgttttgttaggtttagtttaggttttttttttttaggaggaaggtttgtggttttttttttttgttttttagtttttgttggagtatgatttatttatagtttagtttggtttttgtttttgtttttttgattgtgattaggggggtggggtggagggatgtttggtttttttaagttttaggaattagagaggagatggtttagtgatttgttgagggattttttgtttatttttgtggtttttagttgattttatttttttaaatttttttatgtataagtatttgtgatttttgtattgagtatttgttgtgtattaggaatttggaatttgggttgagtagtattgtgttggggttagtagggagtgggagttgtgggagttatggaggtttttagaaggtggtagggtttgagttgaggatgagtaagagtttatttggtaaagaaggggagagggagtttttttttttttttttaggggttttgaggtggtggggtgtggttagtttggttggatatttgttggggagttgggaataggtttttggttttttagaagtttgaatttggagggtgagtaaagttgtaaataagttgttagttgagttattatataattatagatatgataaggatttagggagagaggtttagggtatataggaattttgaagagggtatgtaggggttgattaggtatggagttagggaaagggtttgttaggtagtaggaagtgtatgtgtaaaggttttgaggtatgtgttaagatgtgttgttatggagaattagtgggggaagttgtgaggttggagtgtgtataatgaaggggagtgggtaagaggtagaatgagggggtgtattagtagggttggattatgttggggttttgtgggttttggggaggagtttggtttttattgttatatagggggttgattggtgttttttgtgtgaatagttttaagttggaggttagaggtatagagttgattaatagaaatagatttgatgatagatttagatttgtaggttggattttaaaattttatggaggtttagattaggttttaagaggagtgggtatttgaggttgggttttggaagtggagtaggagtttattagtagtaaggttggagaggatgagagttgggggtgtgggaagtgtaatgttgggtggttggaagttgggagtgaggtagggagtagggaggggttagtttgagagatggggattaaaggtttggtaagggtttaagagttagataggtttgggtttatgttttgattgttttatttgttgtgtgtttttggattatttattgtattttttgagagatttagtttttttgttatgaaaatggggataatagatatttttttgttggattagggttaaaggagggttgtgtgtttagtgtttggtattggtaggtatttggtaaatgggatttgttttgtgttgttgtattggataggttatttggtttttttgggtttggttttgttagttttgtggttaagtttttgtttgggtgattttatggagtttgaaggtgttggttggggtagggttggtttgggagaggatgttggtagttaaggttgttaatgtgtagggtgattttgagttttgttttg

SEQ ID NO: 771 - DNA, 6000 bp, Artificial Sequence
  chemically treated genomic DNA (Homo sapiens)
tagggtaggatttaaagttattttgtatattggtggttttggttgttaatatttttttttgagttagttttgttttaattggtatttttagattttatgagattatttaggtaagggtttgattatagagttagtagggttagatttagagaggttgagtgatttgtttaatgtaatagtgtaaagtaggttttatttgttaagtatttattggtgttagatattgggtatatagtttttttttaattttaatttaataaggaggtatttgttgtttttatttttatgataaagaaattaagttttttaaaagatatagtaaatgatttaaagatatatagtaagtgggatggttagaatataaatttaggtttgtttgatttttaagtttttattaaatttttggtttttattttttgggttgatttttttttgttttttattttatttttagtttttagttatttagtattgtattttttatatttttggtttttattttttttagttttgttgttagtgaatttttattttatttttaaagtttagttttaaatatttgttttttttgagatttgatttaggtttttataaaattttggagtttagtttatagatttaggtttattattagatttatttttattggttagttttgtatttttggtttttagtttggggttgtttatataggggatattgattagttttttgtgtgataatgaaggttaaatttttttttagggtttataaggttttagtatggtttagttttgttgatatatttttttattttattttttatttatttttttttattgtgtatgttttagttttatagttttttttattgattttttatgatagtatgttttggtatatattttagggtttttgtatatgtattttttgttgtttggtaagttttttttttaattttatgtttggttaatttttatatgttttttttaagatttttgtgtattttaggtttttttttttgagtttttattatatttgtgattatatagtaatttaattggtaatttgtttgtaattttgtttattttttagatttaaatttttgggaggttaaggatttgtttttagttttttagtaagtatttaattaggttgattatattttattattttagggtttttgggaagggaaaaaagagttttttttttttttttttgttaagtgaatttttgtttgtttttagtttaggttttgttattttttagaagtttttatgatttttatagtttttattttttgttaattttagtataatattgtttagtttgagttttaagtttttggtatgtagtaggtgtttaatataggggttataaatgtttatatatggggaggtttgagaaaatggggttagttgaggattatggagatgggtagaaggttttttaataggttattgagttattttttttttggtttttggggtttgggggagttagatatttttttattttatttttttggttataattagagaagtaaaagtaggaattaggttgagttgtggataagttatgttttaataagagttaggggatagggagagagagttatgggttttttttttagaagagaggggtttaagttaagtttggtggggtaagggtagataagtagtatttggaggagagggtattttgggagggatatagtttaggagtaaaggtttaggggtatgtgggagggtttaggtaggtagttagttgagagaggtgatatattgtaaattatttttttgggtggaaagattatattattatattattaaaaaggttttgtggtttttatttaattttttagtagagtagttttttttgatattgttgtgtgtgtagttttgttttgtgaatttttattgttttattattggagggatgtagggatagttagattgtggtttttgaggtttgggtttttattttagtttttaattatagggttttggttaagttatttttttttttttagttttagtttttttattagtaaaatgaagataaataagagtttgtattttttaaaaggtgtttagtagatgttggtagttgttattattattggtttagttttatatgtggtaaaattgaggttagaagggaaaagtgaattgtttatggttatttagttgttggttggtaggatggtgttagggttattttttttttaaggtattaatttatttttttttagaatgaattagttagtaattttatattttatttattttttttagttaatgtgtttagtgaataatttatttattgagtatttattatatgttaagtttttatttgtagaagtgtttagaatttttgtttgaggatttttattttatgtatagggatttagaggggtagttttttggtttaggttattgggtgagataagaagatttggtgttttgattttttagttagggggttgagaagagggtttgtaataggattagtttggtttatttttgaaattaagtttgattttagttgtattgtggttgtggttgggtttggatttattttaggtgatttagtaattattgttttaaattgtatagagtttatgaagtttaggaggttttgtttaggggtatatataggttttgtttatttttaagtttatttgaaggatgtaggggttgaaaggatattatataggtgagttttttttgtttattttatttttttattagtttagtaattttagttaggtttatttgttattaatgaggaatttagtttagagaggtaggtagttgtttgaggatatatagtagggtaagtggtagttttggtggggatttaaatttattttaattttagtttaggtagataggtggatttggtttggtggttaatttttaaaatttttgttaatttttgagttggttggtagttgggtttgtttaggggtgaggttgggggttgtgggtaggggagattaaatgtagtttggtttagttttttttaggttggtagtattaggttttatttgaggttttatgagggtagggaggttttggtagtttggtttggtgttttgattttggggttttttagtttgttttgttgatttttttattttttatttggggttggggggtgtagggttgggtagtttaggtagaggtggtgttgattggtttagattttagatttggtttagatttggtttgggggttagggtttagtttgttggtttttttgggggattttatggggagtatgagttggagggggtttttatgtagttaggaattttgtgttttttttgtttagttttttttttttgttgtattataataaaaggttgtgttgggtatggttttgtgtgtttgtttggtgtttgggtattgtggtttggtttggagggggggtgggaattgggggggtggataggagtttttgttggtttgtgatttgatgttagggtggtttggggtgggggtttttttgtgttggttggggtggggggtttgtggaggggtggggggtgtttatttgggttggtgggtgggtgggtttattggtagatggatgtatgggagggtggattgtgggatgtttagtgggatgggtagatggtggtttggttgttttggtttttaggttggaatggattttgggttgggagagatagattgagagagaaagggaggaggaggaggaggaggtggtggtggtttggggaggggaagaggagggagggagtgtgtgagttgggaggaggggtttggtaggtagttgggaggaggaggaaggaggaagtgtgtggggatggattttttgttggtgatttgggagagatttaggggtggtttgagttgggggtttgggtggggtggggatattgggtatagaagttttgttttttattttgttagggtgttgtattttgtgggttttatttgtttttaggttaaaatgttttttttaatttatttattttttatgttttagatttgttttttttgaaattatgattggtaataatattagtgggtgtggagtgtttgttttgggttaggtgttatgttaagttgtttaggttgattttagggtttaattttaattattatttggtttgagtggtggaagattgttttattttatagatggggaaattgaggtattgataagaattaggttttggattttagttttgatttgagttttttaaagtaggggttggggtaggagggatagggtggggaggagtgatatttattttaatagttatgggtttattttaagtgtataagggtaaaatatttttggtagtttattggaagttttttagttttaattattattgtttaggaggggttgattagggtatttgagtggtagttatatttttaagtaagtaaagaggttaagtatttttgaattagggtaggaaatgtagtagaaaaatgggatattgaggaaatgttgttttaggttataaagattttttttttattttttggtgtaggttttagggttatttttttggggttgggtattttatttttggttttttatttgttttggaattttagtatagggaaaggtgggtttgggtttagttttaaatattatatttgtttttatattttttttttgaaagtttttttattttatagatgggaaattaaggtttagataggttaggtttttattttttgggtaaaggtttttgttgagaggagttgggaggagtattttagaatgtggaaggtaaaggtttttgggtataatatattttttaggagattaggaatgagtaaagttttattttatattgatttaggtttgtatttaggttagttgtttttttgttgtggggtggataagttgattagttttttagtttagtttttttatttgtaaaattggagtgaatatggttatagaagatttttgggaaggttggaattgattagtgtgaggatggttaggttgtgttagatgaatggtagtttttgtggtgataaattgaggttagaggggaaaggggttgtttgaggtgttatagttagttaatagtagaagttagtttgggttggtgaaatggttgtatttgtttgtaaggttggtttaaagattaattgtagttttttagggtttagggtgggtttttagttggaggagtaggttttttagtttttttttattttttagatatgtttaaaggtttttattggttatattgggtttgggggggaggtagggatatttatttagtgatatgttggagttggtttttatttatttgtaagaattaattgtgtttatttttttttaattttatatttaagaatgttatattgatagttttatgttagttatagtgggagtatttattttttggatattggaatatgttattaattaagtttttttttttttttagagagttggttatttaatatgtatgagtatattattaaatttatttttaggagtttaatagaaaattttgggttttttgagaattgggatgatagagagtttaaaagtatagattttggattagatttaggtttaagttttaattttgttattttgtagataatgtaagaagttttagtatgttaatttgtagagtgggttaaagatattatagtttttagaagatgtatgtaaggatgaaatgaggtgatgtttgtttagtatatgtgaaattttttttttatttatattttatatgtttttattagagaggaggtaatttagataagtaaaggttttgtaagtatagatgtagttttttatttgaagttattgttgattttaagggtttggtttagtggttgaggtttttaggaggatgtggttagtataatggttttattattgagtgtttgaagtattttttatttttaattatttttttgggtttttgttaggttgtaatttttgttaggaaggtttagtttttgtttttggttattttgttttgttttttaaagttta

SEQ ID NO: 772 - DNA, 6000 bp, Artificial Sequence
  chemically treated genomic DNA (Homo sapiens)
gtttggtatattaaagtaatatatttttaatttttttttttttttttttttttttggaggtggagttttgttttgttgtttaggttggagtgtatggtataaatttgatttattgtaatttttgttttagttttttgagtagttggagttataggtgtttattattatgtttagttaattttggtatttttagtagagatggggttttgttatgttggttagattggttttgaatttttgattttaggtgatttgtttattttggttttttaaagtgttgggattataggtgtgagttattatgtttagtttaattttttttaaattattgtggatttaagttttataatatttttttttatatgtttttataattatatgtgttattgggtatggtagtatgtgtttgaaattttagtaatttaggaggttaagggaggttgaggtaagaggattatttgagtttaggagtttgaagttataatgtattttggttatgtttgtgattagttattgtattttagtttgggtatatagtaatattttatttttaaaaaataataataataataatatttgtttttttttttatttttagaatttttgttatatttttttattttaaatgtgttttgtttttataaatagattatatttttaaaaatttttatttatatttgagtaaaaatgttagaataaatggaatttattttattgatgaagtttattatttagttggttaattaaaaatagaattgttatattattttattgttgattaagaattattttatttataattaagattagattagaatgataagatatttgaaaagtttttaaaattattatttaatatatgagtttttattatgggataattgttattttaatttttttgtttgtgttattttatttaattttatgagatagttattaattttatgagggtaggtattattattagttttattttatagaggaggtaaaagataaagtaagggttatatatttagtgaaaaaggggaaataagattttattttagtttgatttttgagtttatattttttatttattgttataatgtttttttaaaatataaaattgtttattgtatgtggttttttataaatatgtttattaaagatagatataattttatatgtagtatttagtaaattgagggaatttattattaaaatttaaataattttttattttgtttattttttgtagtagtgttttattttttttttatgaatgtgaagttttattattttttataaaataattattttttaatttaaatattttatgtatttattattttatttatttattgatttatttagtggatttttttggataaaattatattatgtataaaagtaattaaatgtaattataataggaaattttattttatttttagttttttttttgtttgatttttatgagtaaaattatatatataaatatatagaaataataaatatatatttatattatgtatatagtatattatataatatatattataaatataaataagttttttagtgatgtatgtagtatatatgtataaaagtatataaattataattgtatagtttagttataaagtaaatatttatgttttttgtttttaataaatgtatatatttttgtggttttatttttataattggagttgggttatagggaatatatatgtttatttttattagattatgttttttaaattggttgtaataaattatattttaatatttttagtgtatgagattttttattattgtataattttattattttttggtattattagtttttatagtttagttatttttatgtatagtgatatttttatgagattttaatttttattttttgtatgattaataatgattttttttttatgtttattaattatttgaatatgattttataaagtgttttttttaattaattttttttttgttttttgtttggttgatttttgtttttgtgatttgtaggagttatttatatattttgatgaagattttttttgatgtattatttttgttttaaaattttatataggtggaatgaatggttgaattatgatatatatatttttgattttttttgtgttgtttgattttgtttttttatttgttttgttaaaggttgaaagggtgttaaagaggtaaagtattttagaaggaataattatgtttatttttaaaaatttttgattatattgttgattgaatttttttataaattggatgttattttatatttaagaaaataataataaatttatttttaaaattttaataaatgtattatggaagaatattttgggagagttttaggaatttatgatgaatatgttttgagtttttattgatattatttttaaaaatgtaaagtgattatataatagggattgtatgtaaatattttatgtttgttttggtttatattttttatttataattaaaatatatgtaattttaaatggggaaaaaggaaagaatgggtttaaattttgaaaaattaattttttttttttagatatttttattattatagagatgattgttgaattttttttttggggaagaaaagtgttttgaaatgtgttttataatttagattagtgaatatttttttttgttttttaaggaatattgtttattggtatggggaaatataaatttgtttgattatatagatattttagtatttggaaaaatggttttgaatttttggttagtattttatggattagaagatttgttgaattttattggtgttattggattaaatttaaataaagtaaggtttttattgttataaattagatattttttatggtagttaaatttttttttttatgtatatataatagttttttttttattttttaggaaattttatgtttagagttggagtttgattggtttagtagtgtggtaaagtttttagatatgttagtgattgaagagtatgttaattggtttgtattttgagaagtaggatttagttatttttatgtaggattggtaaggtaaattattgagtttattaagtattaattataatttgtggatttaggtagatattttttttatggaaaaggatttatatattttattggtatagatattatgaattttaggattaatattgtaatagaattaagttttttatatgttaatatttttattgtatttttgtttttttaaagttttagtttgtttttatttatttaataaatatttattgaatgttgattatgtgtaaagtattgggaaaggtattaggtaataaagttatgaattaaatagatttttattgagtatgtattttaattgtgaaaatagatattaagtagataaaagtagaaatataagattatagttgatttttgaataatatggatatgaattatattggtttatttatatgtggattttttttaataaatatattggaaaattttttggagatttgtgataatttgaaaaaaatttggagataaattatattgtttagaagtattaaaaaaattgaagttaggtatgttatgaatttataaaatatgtatagatataagtttattttattatttatgattataaaatatatataaatttattataaaaagttaaaatttattaaaatatatatatataaatatagattatatatggtattatttatagttaagagaaatgtaaatatatataaagatgtagtattaaattgtatttgtataaaattaattgtagtatatattgtattattgtaataattttatagttattttttgttgttattgtagtaagtttaagtattgtatatatttatttaaaatgttatgtaggttgggtgtagtggtttatgtttgtaattttagtattttgggaggttgaagtgggtgaattatttgaggttagagtttaaaattagtttggtaaatatggtgaaattttgtttttattaaaaatataaaaagttgggtgtggtggtatgtgtttgtaattttagttatttgggaggttaagttaggagaattgtttgaatttgggaggtagaggttgtagtgagttgaggttatgttattgtattttagtttgggtaatagagtaagattttgttttaaaaaataaaataaaataaaatgttatgtaatgttgattatttttatatgagtattttattattttagtaaattgtttattgtagtgaaaagtgattttttatagtttttggatattttttattatgtttagtgtaatattgtgaattttgaataatattatgagggttgtaaggagtgtttttagtgatgttagaggtatttttaagaagtagagaaatgttatgatgttataagtaaaagttgaattgtttgatgtgtattatatattgaggtttgtagttgtagttgtttttattttagatagataattaattttgtaaatagataatataaattttgtttgtttttgtttttttgagatggtgttttgtttttgttgtttaggttagagtgtaatggtataattttggtttattgtaatttttgttttttgggtttaagtgatttttttgttttagttttttgagtagttgggattataggtatgtgttattatgtttagttaatttttgtatttttaatagagatggggtgtttttatgttggttaggttggttttgaatttttgattttatgtgatttatttgttttggttttttaaagtgttgggattataggtgtgagttattgtgtttggttaaattttttttttttaataagagatggggtaggtggattatatttgtaattttagtattttgggaggttgaggtgggtggattatgaggttaggagtttaagattagtttggttaatatggtgaaattttgtttttattaaaaatattaaaattagttaggtgttgttgtatatgtttgttagttatttaggaggttgaggtaggagaattatttgaatttgggagatggaggttgtagtgagttgagattgtgttgttgtattttagtttgggtaatagagtgagattttgttttaaaaaaataaaaaataagagagagatggggttttattgtgttgtttgggttggttttgaatttttgagtttaagtgatttttttttttttattttttaaagtgttaggattataggtgtgagttattatgtttggttaaaagataaaataaatgtatagtattagtaaatatagtatagtattgtaaatgaatttttttttttttatgatttttttaataatattttatttttattgttttattttattgtaagaatataatgtatagtatatatattaagtaagtgttaattaattgtttatatttttgttaagatttttaatttatagtagttatttgtagttaagtttttggggagttaaaatttatatatggatttttagttgtataggagattagttgtttttattttttatattgtttaagggttagttgtataaattatattaagtgttaggaaggaaaaaataatagtgagttaagaataattaattgaggatttgtggggaaaaggtaaatatatatatattgggtttaggaaagatttttttgagatgataattttgaagttgagattgaagtatagttatatttttgaggtattgtgagtggtttagttttagattattgtattaaagtagaaattataatagagttataaatgttttggttttttagtgtatataaaagttttgtttatattatattgttatttgtaaagtgtgtaatagtttgttatttgtaaagtgtgtgatagttttatgtttaatataataatgtatatattttaaaaatattgtttaaaaatgttgatgattatgtaaggttttagtaagttgtaatttttttgttggtggagggttttgttttagtgttgatggttgttgatttattaagttggtgg

SEQ ID NO: 773 - DNA, 6000 bp, Artificial Sequence
  chemically treated genomic DNA (Homo sapiens)
ttattagtttggtaagttagtagttattaatattgaggtaagattttttattagtaaaaagattataatttgttgaagttttgtatgattattagtatttttgagtaatatttttaaagtatgtatattgttgtgttagatgtaaggttattatatattttatagatgatagattattatatattttatagatgatagtataatgtgaatagaatttttatatgtattgggaaattaaaatatttgtgattttattgtgatttttgttttagtatagtggtttagaattagattatttataatattttagaggtatagttgtattttagttttaattttaaggttattattttagagaggttttttttgaatttaatatatatatatttgttttttttttataaatttttagttagttatttttagtttattattgtttttttttttttggtatttaatgtgatttatatagttgatttttggataatataggggataggggtaattgattttttgtataattgaaaatttatgtgtaaattttgattttttaaaaatttaattataaatgattattgtagattggaagttttaatagaaatataaatagttgattaatatttatttggtatatgtattatatattatatttttataatagagtaagatagtgaaaataaaatgttattaagaaaattataaggaagagaaaatttatttatagtattgtattgtatttattgatattatatatttattttgttttttggttgggtatgatggtttatatttgtaattttagtattttgggaggtaggggagggaggattatttgagtttaggagtttgagattagtttaggtaatatagtgagattttattttttttttgttttttgtttttttgagatggagttttattttgttgtttaggttggagtgtagtggtgtaattttggtttattgtaatttttattttttaggtttaagtgatttttttgttttagttttttgagtagttaataggtatgtataataatgtttggttaattttggtatttttagtagagatggggttttattatattggttgggttggttttgaatttttgattttgtgatttatttgttttggttttttaaaatgttaggattataggtgtgatttatttattttattttttattaaaaaaaaaaagtttggttgggtgtggtggtttatgtttgtaattttagtattttgggaggttgaggtgggtggattatatgaagttaggagtttaagattagtttgattaatatggagatattttgtttttattaaaaatataaaaattagttgggtatggtggtgtatgtttgtaattttagttatttaggaggttgaggtaggaggattatttgaatttgggaggtagaggttgtagtgagttaagattgtgttattgtattttagtttgagtaataagagtaaaatgttattttaaaaaaataaaaataaataaagtttatgttgtttgtttataagattagttgtttgtttgaaataagggtaattgtagttgtagattttaatatatggtatatattaagtaatttaatttttgtttgtaatgttatgatgtttttttgttttttgagagtatttttagtattattagaggtattttttatagtttttatagtgttatttagggtttatggtattgtattaaatatgatgaaaaatatttaagaattgtgagagattattttttattgtaataaataatttattgaagtgatgaagtatttatgtagagatgattagtattatatagtattttgttttgttttgttttttgagatggagttttgttttgttgtttaggttggagtgtaatggtgtgattttggtttattgtaatttttgttttttgggtttaagtaatttttttaatttagttttttgagtagttgggattataggtatatgttattatatttggttttttgtatttttagtagagatgggattttattatgtttgttaggttggttttgaattttgattttaggtgatttatttgttttggttttttaaagtgttgggattataggtatgagttattgtatttagtttatatagtattttaagtggatatatgtaatgtttgagtttattataatagtaataggaggtggttatgaaattattatagtagtatagtatgtattatagttaattttatgtagatataatttaatattgtatttttatatatgtttgtattttttttgattatgagtggtattatgtatggtttgtgtttgtgtgtgtatgttttgataaattttaattttttataatagatttgtgtatattttatggttgtaaatgataaaatagatttgtatttatatatattttatggatttatgatatatttaattttaatttttttgatatttttggataatgtagtttatttttaagttttttttaaattgttataaatttttaaaaaattttttaatatatttattgaaaaaaatttatatataagtagattagtgtagtttatatttatgttgtttaagggttaattgtaattttatatttttgtttttatttgtttaatgtttgtttttatagttagagtgtatatttaatgaaggtttgtttagtttatgattttattatttagtgttttttttagtgttttatatatagttggtatttaataaatatttgttaaatgaatgaaggtaagttagggttttaaaaaagtagaggtgtagtaaaaatattagtatatagagaatttaattttattgtaatattggttttagagtttatagtatttatgttagtaaaatatatggatttttttttatagagaaagtatttatttaaatttatagattataattgatatttaataaatttagtgatttgttttattagttttgtgtgggaatagttaaattttgttttttgggatatagattaattggtatgttttttaattattgatatatttgggaattttattatattgttgaattagttaaattttaattttaagtatggagttttttaagagatggaagaaaagttattatatatatataagagagaaggtttgattgttataaaaaatatttaatttatgataataaaaattttattttatttggatttgatttagtaatattaatagggtttagtaaattttttaatttatgaggtattggttaaagatttaaagttatttttttagatattagagtgtttgtgtaattaaataagtttatatttttttatgttaatggatagtgttttttaaaaaataaagaaaaatatttattagtttaaattataaaatatattttaaaatattttttttttttaaaaggaaaatttaataattatttttataataatgggaatatttaaaaaaaaaaaattgattttttaaggtttaagtttatttttttttttttttttatttgaaattatatgtattttaattataaatagaaaatatgaattaaagtaagtatgagatatttgtatgtaatttttgttatatagttattttgtatttttaaaaatggtattaataagaatttaaaatatatttattataaatttttgaagtttttttaaggtatttttttatgatatatttattaaaattttaaaaataggtttattattatttttttaaatataaaataatatttaatttgtgaaaaaatttaattagtggtataattaggagtttttaaaggtaaatataattgttttttttgaaatattttatttttttagtatttttttggtttttaatagagtaaatggaaaggtaaagttgagtagtatgaggaagattaggaatgtatatattataatttagttatttattttatttatgtaaaattttaaagtaaaaataatatattaagaaaagtttttattaaagtatataaatgatttttataaattatgaagataaagattaattaaatgaaaaataggaaagagattgattggaaaaggtattttataaggttatatttaaatagttaataaatatgaaaagggagttattattagttatatagaaaatgaaaattaaaattttatggagatattattatatataagaatggttaaattataaagattgatgatgttaaggggtggtaaggttatgtagtaataggaaattttatatattaagagtattggggtataatttgttataattaatttggaaagtataatttaataaaagtgagtatatgtattttttgtgatttagttttaattgtaggaataaaattatagaaatgtgtgtatttgttaaaagtagaagatatgggtatttattttgtgattgaattatataattatgatttgtatatttttatgtatgtgtgttatatatgttattaaaaaatttatttatatttataatatatattatataatatattatatatataatataaatatatatttattatttttatatatttatatatataattttgtttataaaagttaaataaaaggaaaattaaaggtaaaataagattttttattatgattatatttagttatttttatatataatatagttttatttaaaggaatttattaaataaattagtaggtaaataaaatgatggatatataaagtatttgaattgaagaataattattttataaaaggtaatgaaattttatatttataagggaagaataaaatattgttataaaaagtgaataagataaaaaattatttgaattttaatgataaatttttttaatttattgggtgttatatgtgaaattatgtttgtttttggtgaatatatttgtaaagaattatatataataaatagttttgtattttaaaaaaatattataataatggataaagagtatgggtttagaaattagattggagtagaattttatttttttttttttattaagtgtgtgatttttgttttgttttttgttttttttatgaaatgggattaataatagtatttatttttataaggttgataattattttataaaattaaatgagataatataagtaaaggaattagaatagtaattgttttatgatagaagtttatatgttagatagtaattttaaaaattttttaaatgttttattattttggtttaattttgattataaataaaataatttttaattaataataaaatagtataataattttatttttaattagttaattaagtaataaattttattagtaaaataagttttatttattttagtatttttgtttaagtatggataaagatttttaaaaatatggtttatttatagaaataagatatatttaaaatggggaaatgtggtaagaattttaaaggtaaaagaaaaaataaatgttattattattattattttttagagatagggtattgttatgtgtttaggttgaagtgtagtggttagttataggtatgattaaagtgtattatagttttgaatttttgggtttaagtgatttttttgttttagttttttttagttttttgagttgttgggattttaggtgtatattattatgtttagtaatatatataattgtagaaatatatagagaaaaatattatgggatttaagtttgtaatgatttaaaaaaaattaggttgggtatggtggtttatatttgtaattttagtattttgggaggttaaggtggatggattatttgaggttaggagtttgaagttagtttggttaatgtggtaaaattttatttttattaaaaatgttaagattagttgggtgtggtggtgggtgtttgtaattttagttatttaggaggttgaggtagaggttgtagtgagttgagtttgtgttatgtattttagtttgggtgatagagtaagattttgtttttaaaaaaaaaaaaaagaaaagaaaaattaaagatatattattttaatgtattagat

SEQ ID NO: 774 - DNA, 6000 bp, Artificial Sequence
  chemically treated genomic DNA (Homo sapiens)
gatgaattttaaaaatattatgttatgtaagttaattataaaaggatagttatttattgtatgtttttatttatataaagtattaagaataggtaaattggtagagatggaaaatagaatagaaataaaaaggaattgagggaaaggggtagttatgggtatgaagtttttgtttgggatgatggttaagtgttggaaatggatattggtgatggttgtatagtattgtgaatgtatatttaaaaatgtttaaatagtaaattttaggttatgtatattttataattaaaaagagataaatggttaatttaatgtgaagtatagttataggaatttatatttgttattggtgattataaaaataggtgtattatgtatgagtgtatgagatgtttaagttaattttgtattttttttttattttaaggattatgttattttagaattttagtttttttaatgaagaagtttggaaaggagttaagaggtttgtttaaagttaagagtttttagaggtatattataaatatgtttttttaaaaatattgtaatttttgatatttatattgggtttagttttttgaaaaatattagaaagaaagtttagaaaaataagtttatgtatatgttggtttttataaattaatggtgtttattaatttattttaaaaattaatgtaatagaaaaggtaagtttgttgagggaaaaatatttggtgaatagtagaaaagtttttttttttttaagagttaaggaaagggggaagagaagaaaaaggagagaagagaaaatgaattaaaaattatatttttaaaagtgtgataagtttaaagatagtaattttaaagatgaatttaaaagaaaatttttttgatagttttaataatttaaataaatattttaaattagttaatataaattaattttttttaattattattattttattattattattattatatataatttatattaatattttttattatagaatgatattttttttaagtgatatagtatgttaaatatatagaaattatatttattaatatatttgtttaatataagaaatggtagttttttgaggtatttttaattggatataaattttagtgggtaaaaggaaatttataggtatggagttattagatgttatttgtgaatttattgtttagatgttaaggatgtttgttatagtaggaggtattatgaaattgaagtatatttataattatggggttttagaaattagtaattaaaatatagtaaaataattattagttaaattttatattaagatatgataaagattattaatttataattagtttttagattttaatatagttaataatgtaataggaggttaattaaataatgtgatattttaaaaattaagagtaagttagtagaaataaattatttaaatatatttttattattttataaattatatatatgtatattatttaatttatattattaattaaaggaaaaaaattatttttatatatatataaataaaaatatatatatatatatatgtatatatatatatattatattgatttaaatttaatatagatatttgatatttgaataaattgtatgtttaaggattatagggttttaagaaatttagttaattagtatttgataggtgatttttttttaaattttatttagaaaatattagttttttaggttgagtttttttttgtaaattttaatgaaaatgataattaagagggtttttttttaataagaataatttgtaattaagagggttttttttttataaggataattttttttttttttgagatggagtttttttttgttgtttaggttggaatgtagtagtgatattttagtttattgtaagttttgttttttagttttatgttatttttttgttttagttttttgagtagttgagattataggtgtttgttattatgtttggttaaattttttgtatttttagtagagatggggttttaattgtgttagttaggatggttttgattttttgattttgtgatttgtttgttttggttttttaaagtgttgggattataggtgtgatttattgtgtttagttaataaggataattttttattaattttatggtttattttttaagtattaaaaatattaaattgtttaatatagatggtaaggttttttgtgttatttttttggtttattttttttgtttttttattattttatagtttgagattggtattatagtgttttttgtttttttgttgttagatttatgtttatatgaggaataaattttttatattaaaataaatgtattattttaataaatgtattttttaatagtgttatttaagttttatttattttttaagggttttttttaagaagatataataataataattggaagaatatgagtgttaaagttaaatgaattaaggtttatttaataattatgttattaatgaaagtgttatattaaaagagataggaggttgggtatagtggtttatgtttgtaatattattatttggggaggtttagatgggtggattgtttgagtttaggagtttgagattagtttgggtaataaataagattttgtttttataaaatatataaaaaattggttaggtgtagtggtgtatatttgtagttttagttatttgggagattgaggtatgaggattgtttgagtttaagaatttaaggttgtattgagttaaaatagtattattgtattttagtttggataataaagtgagattttgttttaaaaaaataaaaattaaaaaataatttttagaattttttttgttaataaatggaaaaagaataataaattagaaaattataattttgtaagtgttaatgaattaatagatttaggtaatgattattaatagatgttaaagatataaataataataaggtgaaaggagaagaaattttataattgtttgtgtttgttttgttgatattataggaattttttgattttagtattattaaaagtgggattattagatattatgtgtttttttatgaaatgtaatagttagtatttattatttatataaaataaaattgaatttgaatttaattaaggttttagatttgatttatgtgttagtttataggaaatagagaaaaaagttaaatattttaaggaagtaattagttaagtagagaatgtggtatttttaataaaataaattatatggtttttttagttaattaatattaagaagaggaggaagaagatggtggaaggattgttaaagaatttaaaaaatatttaggagatatagttaaatttaatgttagttggaataaattaattataaaaaattattttagttaggtattgtggtttatgtttgtaattttagtattttgggaggttaaggtaggtggattataaggttaggagtttgaggttagtttggttaatatggtgaaattttatgtttattaaaaatataaaaattagttaggtatggtggtgggtgtttgtaattttagttatttagaaggttgaggtatgagaattgtttgaatttgggaggtagaggttgtagtgagtttagatagtattattgtattttagtttgggtaatatagtgagattttgttttaaaaaaataaaaatataaaaattagttgggggtggtggtgtgtgtttgtagttttagttatttgggaggttgaggtagaagaattatttgaattaggaaggtggaggttgtagttagttgagattatgttattgtattttagtttgggtaatagagtgggattttgttttaaaaaaaaaaaattaattatttttgggttaggtatggtggtttatgtttgtaattttagtattttgggaggttgaggtgggtggattatttgaggttaggagtttgagataagtttgattgatatggtgaaattttgtttttattaaaaatataaaaaaattagttaggtatggtggtttaagtttgtaattttagttatttaggaggttgaggtaggagaattgtttgaatttaagaggtggaggttgtagtgagtagagattgtgttattgtattttagtttgggtaataaaagtaaaaatttattttaaaaaaaataaaaaataaataaataaaatttatttttgaaataatttgggaaatttaaatatggatttattataagttttttgaggagatataatgtttagtggttttatttttagttatgttaagattgattatagaatttaggtattgttaatatgttttttaaagtattgttttttattatagtatatggaaaggtttttatatttaggaatttttaattaataaatttttataaatatgaataaaattatatagttattatatatgttattaaggtattagttttaaaattaagtaaattattttagagtagtttttgaagatttggtgtaggagttttttaattttgtaagtaataagtatttaataagtatttgttgaatgaaaatatgttgtattaatttataaagattatattttgtagggttaggtagggtggtttagtttataattttagtattttgggaagttgaagtaagtggagtgtttgagtttaggagtttgagattagtttgggtaatatggtgaaattttgtttttattaaaaatataaaaaaattagttaggtatggtggtaggtatttgtaattttagttattagggaggttgagttaggagaattgtttgattttagagggtggaggttgtagtgggttaagattatattattgtattttagtttgggtaatagagtgagagtttgttttaaaaaaaataaaataataataaaaaaatatatatatatattttgtttatatttaaatattattatgtaaagatagaggtggaagttagttattgaataagtaatttaagtattatgtttaattaagagttgttaataaaagttggaggaaaaatgaaagttagtatgtatgtatgtatgtatgtatgtatttgtttagagatggagttttattttgttatttaggttggagtgtagtggtatgattttagtttattgtaatttttgttttttaggtttaagtaatttttttgttttagttttttgagtagttgggattataggtatatattattatgtttggttaatttttgtatttttagtagagatggggttttattatgttggttaggttagttttaaatttttgattttatgatttatttgttttggttttttaaagtgttgggattataggtatgagttattgtgtttggtttagaagttagtatttaaaattgaggtgggtttatgaaatattagttttttgttatagaattagaaatataataaatttgtatatgtttttagtttttttaatatagatttttgttaagaattttagaattgaaattaaattatttaattaatataatattaataaaagagtatgaaattagaaaaataaaattttgggattttatttttattagatagttggaaatggtaaggtatttgagatataatgtttagagtagtaatttttttaaagagattgattgtattttattagtatttttattttatagtattaattgttaagatataaaattttaaatttttaagttattagagaaaatgtattaaggtagatataaaaattttttgatgaaggttaggtgtgttggtttatgtttgtaattttagtattttgggaggttaaggtgggtagattatggggttagaagtttaagattagtttgattaatatggtgaaaatttgtttttgttaaaaatgtaaatattagttgggtatggaggtatgtttttgtaattttagttatttgggaggttggggtaggagaattgtttgaatttgggaggtggaggttgtagtgagttgagattgtattattgtattttagtttgggtgatagggtaagattttatttttaaa

SEQ ID NO: 775 - DNA, 6000 bp, Artificial Sequence
  chemically treated genomic DNA (Homo sapiens)
tttggagatggagttttgttttgttgtttaggttggagtgtagtggtgtgattttggtttattgtaatttttgttttttgagtttaagtgatttttttgttttagttttttaagtagttgggattataggggtgtgtttttatgtttagttaatgtttgtatttttaatagagatgggtttttattatgttggttaggttggttttgaatttttgattttatgatttgtttgttttggttttttaaagtgttgggattgtaggtatgagttagtgtgtttggtttttattaagaaatttttgtatttattttaatgtattttttttaatggtttagaaatttagaattttatattttggtagttgatgttataggatgggagtgttggtgagatgtagttagtttttttgaaaagattgttgttttgggtattatgttttagatgttttattatttttagttgtttggtaagggtgagattttagagttttatttttttagttttatgtttttttattagtattgtattaattgggtgatttggttttagttttgagatttttgataaaaatttgtgttgaagaaattagggatgtgtataggtttattatgtttttaattttgtgatagagggttgatgttttataaatttattttaattttaaatgttaatttttgggttgggtatggtggtttatgtttgtaattttagtattttgggaggttgaggtgggtggattatgaggttaggagtttgagattagtttgattaatatggtgaaattttatttttattaaaaatataaaaattagttgggtatgatggtgtgtgtttgtaattttagttatttaggaggttgaagtaggagaattgtttgaatttgggaggtagaagttgtagtgagttgagattatgttattatattttagtttgggtgatagaatgagattttatttttaaataaatatatatatatatatatatatatatattaatttttattttttttttagtttttgttggtagtttttggttagatatagtatttgagttatttgtttagtagttggtttttatttttgtttttgtatggtggtatttgaatataagtaaagtatatatatatatttttttattgttgttttgttttttttgaggtagatttttattttgttgtttaggttggagtgtagtggtgtaattttggtttattgtaatttttattttttggggttaagtaatttttttgatttagtttttttggtagttgggattataggtgtttgttgttatgtttggttaatttttttgtatttttagtagagataaggttttattatgttgtttaggttggttttaaatttttgggtttaagtattttatttgttttggttttttaaagtgttgagattataggttgagttattttatttggttttgtaaagtatggtttttataagttaatatagtatgtttttatttagtaaatatttattgaatgtttattatttgtaagattgagaagtttttatattagatttttaaaggttgttttgaagtgatttgtttaattttaggattagtgttttaataatatgtgtagtgattgtgtagttttgtttgtgtttatggaagtttattggttaagagtttttgagtatagagatttttttatatattgtggtgagaaatagtattttaaaaagtatgttgataatatttgaattttgtgattaattttagtatggttaaaagtaagattattagatattatatttttttaaggagtttataatgaatttatatttaaattttttagattattttaaagataggttttgtttgtttgttttttgttttttttgagatggatttttgtttttgttgtttaggttggagtgtaatggtataatttttgtttattgtaatttttattttttgggtttaggtgatttttttgttttagttttttgagtagttgggattataggtttgaattattatgtttggttaatttttttgtatttttagtagagatagggttttgttatgttagttaggtttgttttaaatttttgattttaggtgatttatttattttggttttttaaagtattgggattataggtataagttattgtgtttggtttaaagatagttggttttttttttttgagatagagttttattttgttgtttaggttggagtgtagtggtgtgattttagttaattgtaatttttatttttttggtttaagtgatttttttgttttagttttttgagtagttgggattatagatatatgttattatttttgattaatttttgtatttttatttttttgagatgaagttttgttgtgttgtttaggttggagtgtaatggtgttgtttaggtttattgtaatttttgttttttaggtttaagtaatttttgtgttttagttttttgagtagttgggattataggtatttgttattatgtttggttaatttttgtatttttagtagatatggggttttattatattggttaggttggttttgaatttttgattttgtgatttatttgttttggttttttaaagtgttgagattataggtatgggttatagtgtttggttaagatagttttttatagttgatttgttttagttaatattggatttggttgtgttttttaagtgttttttaaattttttaatagtttttttattatttttttttttttttttttgatattgattagttggagaaattatataatttgttttattgaagatgttatattttttatttggttgattgtttttttgaagtatttaatttttttttttgttttttgtaaattagtatatagattagatttaaagttttgattagatttaagtttagttttgttttgtgtgaatggtaagtattgattattgtattttatgaggagatatataatgtttgatagttttatttttagtaatgttaagattaggggatttttgtagtgttaataagatagatatggatgattgtaaagttttttttttttttattttattattatttatgtttttagtatttattaatgattattgtttagatttgttagtttattagtatttgtagaattgtgattttttaatttattattttttttttatttattagtaaaagaagttttaaaaattgttttttaatttttatttttttaagatagggttttattttgttgtttaggttggagtgtagtggtattattttagtttaatgtagttttagatttttggatttaagtaatttttatgttttagttttttaagtagttgggattataggtatgtattattatgtttggttaattttttgtatgttttgtagagatagggttttgtttgttgtttaggttggttttaaatttttggatttaagtaatttatttatttaagtttttttaagtaatggtattataggtatgggttattgtgtttggttttttgttttttttgatatgatatttttattaatggtataattgttaaatgaattttggtttatttaattttagtgtttatgtttttttaattattattgttgtatttttttgaaggaagtttttaaggaataggtaagatttaaatggtattattaaagggtgtatttgttgggatagtgtgtttgttttgatatgaggagtttattttttatgtgaatataggtttagtagtaggaaggtagaaggtattgtgatattagttttgggttgtagagtgatgggagagtaagaaaaataggttagagaaatagtataaggggttttgttatttgtattgagtgatttggtgtttttaatgtttaggggatgggttgtgaggttgatagaaaattgtttttgttggttgggtatggtgggttatgtttgtaattttagtattttgggaggttaaggtgggtggattatgaggttaggagattgagattattttggttaatatggttgaaattttgtttttattaaaaatataaaaaatttagttaggtatggtggtaggtgtttgtagttttagttatttgggaggttgaggtaggagaatggtgtaaaattgggaggtggagtttgtagtgagttgagatgttattattgtattttagtttaggtaatagagagagattttattttaaaaaaaaaaaaaattgtttttgtagagaaagggtttttttgattgtaaattgtttttgttgagagagggtttttttgattgttatttttattggaatttgtagagaaaaatttagtttaagaagttaatattttttaaataaagtttggagaaaaattatttgttaagtgttggttaattaaattttttaggattttgtaatttttaagtatgtagtttatttagatgttaaatatttatgttgaatttgaattaatgtggtgtgtgtgtgtgtatatatgtatgtgtatatatttttatttatatgtatataagaataattttttttttttagttggtggtatggattggataatgtatatatatataatttgtgaagtgataaaagtgtatttaaataatttatttttgttgatttatttttggtttttaaaatattatattatttaattggttttttgttatattattggttatattgaaatttaaggattaattgtagattagtggtttttattatattttggtataaaatttggttgatggttgttttgttatgttttaattattgatttttagggttttgtggttatgaatgtgttttagttttataatgttttttgttatggtagatatttttgatatttgggtggtggatttatagatagtatttgatggttttatatttgtggatttttttttgtttattgggatttatatttagttggaggtattttgggaagttattattttttatattaagtaggtatgttaataggtataatttttatgtgtttagtatattgtgttatttgggggaaatattattttataatagaaaatgttaatgtaaattatatgtgataatgatagtaatgaagtgatggtaattaagaaaaattagtttatgttagttagtttgaaatgtttgtttgggttattaaaattgttaagaagatttttttttgagtttgtttttgaaattattgtttttgagtttgttatatttttaaaaatgtgatttttggtttattttttttttttttttttttttttttttttttttttttttgatttttgggggaagaaagatttttttgttgtttattagatattttttttttagtaggtttgttttttttgttgtattagtttttaaagtaaattgatgagtattgttgatttgtaaaaattagtatatatatgaatttgtttttttaaattttttttttaatgttttttaaaaagttgaatttaatgtgaatattaggagttatggtatttttaagaaaatatatttatgatatatttttgaaaatttttggttttggataagttttttaatttttttttaagtttttttattagagaaattggaattttaaaatggtatgatttttaaagtaaaaagaaaatatagaattgatttaagtattttatatgtttatgtatggtgtatttatttttatagttattagtgataagtatggatttttatggttatattttatattagattaattatttatttttttttaattgtgaaatatatataatttggaatttattatttagatatttttaggtgtgtatttatagtgttgtgtaattattattagtatttatttttagtatttaattattattttaaatagaaattttatatttataattgttttttttttttaatttttttttatttttattttgttttttatttttattagtttgtttatttttggtattttatataagtggaaatatataataaatagttatttttttgtagttggtttgtatagtatagtgtttttaaagtttatt

SEQ ID NO: 776 - DNA, 6000 bp, Artificial Sequence
  chemically treated genomic DNA (Homo sapiens)
taataggtgtagattttaatttaagtaatgtaaagatttattttatttttttatttttaatatattagttagtaggtaggagaaagagaaaataaaaatattgtatagaagattatagtgttttgttttagggttgtaagtattgatattttatttattattaatttttagttattgaatgtttatagtgtttggttttgttagagaatagaatatttaaaatatttgattttttagattatgaggtttatattttaagaagttagtattttttttgggtgattttttttttttattttattttatgatgtgtagtattataatattatattaatttaatttatattttaaaaaaattatatgaatgtggtttaatttatatttttaaaaaaggttgaatttattgttagtatttaataattggaaaatagtttataaaaatttgtatttttagtttttttaggaaaattggaaaatttgggtttatatttttgtgtggtaataattagttaaattttagtttagttgtttgttttaagattagttatttgtattttattgtatttagagggtttttttaatagtgttttttttaagtggtttttttaaagtagtggtttttaaaatttggttttttattggaataatgtgaggagtttgaaaagttattaatgtttgtattttattttagagattttgatgtaatttatttggggtgtagattaggtattgagatttttataagttttttaggtatttgtaatgtgtagagaaaattgagaatttttgtttaagatagggttttttaaagtttaatttgtataggaattatttgataattttgttaaaatgtagattttgattaagtatgtttgggatagggtttgggattttgtttttttaataagtttttatatagtgttaaagttgttggtttatgggttttatttgagaagtaaaggtttaagttatttgtattttatattggttttgaattttaagatatatttttaggttttaagtttaatgaaagttaattttagtatttataatattgatgtagttggaatgatgatgttaaatgagagtattttattatattttggggagaatttttttttagtttatagttatttagttttttttgatattggggggtttttgattttttatgttttgtatgtgatatttttgtattattttttttgttgtaaattgtatattttttgttattttgagttttttgttggtgttattatttgttggttaatagtttggttattattgattgaattatggtgtttgggtatttaatgtgagtattttattgtagaggtttttaattagtgtttttagaagttttagagtaatagttttgaaattatagggtatgtattagattatttggagagtttattaaaatatagattgttaggttttatttttagtatttttgatttagtgaggataatttgaatttttaataaatttttaggagatttagatgtttttagtttaaggatttagaggttttagatagaaggaagggaggtggtgtaatgggttttttggttttgttatatgattttttattttatagttgtatttggggattttagattagattttattaaataaaaagattatttttaaaaaagtttgaatattgttgttttgttgtttttgtttttgttttatagaaattaattgaaggtgaaaataaataaaaatgttaatattagtgatatggggagatattattagtttaaaataaatgaaatattgaatttatttagtatatgaaaagagagttttattttttttttttgggatattttttatgatgaaaaaatgtaaaggaaatataatgtatgttggaaataaattattaaagattgtgtttaaatgaggaggtgtatttgggaattttattgtttttaggtttgtgggtgaatagaattttattgtaatagtgtataagattttttttagttatttttagaagaaggagataattagtaaggtttttattgttagagtttgtttagagtggaatttaaaggaaatattgggaaggttatagtagttttattttagtttattggattggattaaagtaattttattgtaaggtaaggtatattattttatttatagatagagaatgtatgaagttttttattttatatagtaggtgtgaagaaggtattttggtaaattttttatttgtttttagataaagtgtatttttaaatatgatgtgggtagttgtttgtttttgtgttgtttttgtaagagatattttggaataatagaaatattagtgtttgaatagtttaaagtggagtttatttttttgttaggtgagttatttttaaaaatgatattttttaaggataagtgatgaattttaggatgtttttttttttatttttaatgtttataagaataaattattaaatttaatgttttatagaggttaagtgtttaggttttgtgtgtttgtttttaagagtttttttgtaaggaaattgggagggaattataaaagggttttaggtaaatagggtgggtgggtgtagggttttaagttgtagaaaggagaatttggaaagagtttttaggaagtagatttttatatgttttaatatgaaagagtggtatatgtggtgttggtattttattttattattagtggaaggtttgaattaatattaaatttttttggagtaatttaggtaattattatttgaagaatatgtattttaaaattaatatttttaagagataatgtaatttatttgtgtttttttgttttttttgtttgtgttaattttattttttgttaattttgtttttgattttgtgaatgttgaggggtttgtggtttgtttgagtgatttttatttgttttgttattttaggattagaagttattagttagtgtatgtttttagaaaatttttttttttttttgtgggtttgtttggtttttggaggtggtggtgttaggttgttggagttagttagtggtaggttgtgggtgtttgtttttttggtttatttttttattttttttttatttttggagtgttaggtgggtgttgtgggttttttgtttatttggaaggtagtgttggtgagattaggaattgtagggtttttttgttttggtgagttttggaatttgagttttttttattttagttattttgttggggtgttaggggtttgaaaaagtttggggttggttgaaagatatttggattagagatgtagttagtttttagggaggtttgaatttgtttttgatttttttgaatttttttgtttttgtgttgggagatgtttagtagttgggtgggtttgggatgtgtagagttagagtattttgtagtggaggtagtgtgtggtatggttgtttggggtatttttgtggttggggggtggaaggtgagggtggtggtaggaagggtttgttaggtttgagtttgtttttttattgttagttgttggtttggaggtttgagttgtgtggatggaaaggggtggagttgtgggttttggttggtgtgggtttgggggtggggtgtgtggggttgggttggaggtggggttagtgttgggtgttggagttgtgggtgtatggagaggagttgttagtagttggagtggagttggaggaagtagtggtagtggtgagggtggtaggttagttgttggagatggtaagtatggattgggtatggttggtgggttgtagttgggttggaggttggttggaattgagtgggtaggaggttattgttgtagtgtgggttttgtagaggaaggaagttggtgggtggggtaggtaggtagtagtagttttgggtgtgtgtgtttgggtgggggaggtggtgtatgtgtgtatggttgttgtgattttttttttgttattggtagtggtttttttttttgtagagttttgttggggggaagtgggttggttattggttttttttgtttttggtattttttggttgttgggtagtattatttttgtgtgtggttggtgttttgtgagatttttgttattttgatttttgttttttttgtttttttgtgagttggttttgtatgttgttggttgtatttgtttttggagttgttgatgagtttgggtttttttttattttttgttattgtatattttggagggtttttgttgttgttttgttgtagttttttggggttttttattggaggagagtgttttggttgttgtttttgtgttgtgggaaggagtgttttttttttttgtggttttttagttgtagttagggttgttgtttgggttttttttggggtgggtgaggtggtggtggtttttggagtttgttttttaatttttgttttttgaagtttgttgttttttttttttggggtgggggaagtgtgttttggggtggttggttgttggggttttaatttagtgtttattgttagttaagtttgggtaggttgttggaggtatatttagtggggttttggaattgtttggaaatttagtttttggaatgtggggtgaggtgggagggatttgtttagtaatatggagttggttggggagagttagggagtttgtaatttggagttaaaatattgtgggtaattttttggaaattatagttttaatttaagtttagaaattgttttttagattataagataaagagaatagaaaatttttggttaggtatttttgtatagaaatatattttgataattagaattggagtttgaaatgtaaggatatatgtagaatggttgttatgtgttgaatgtagaatgtgtgttaattgggtttgggggaatttttttgttttttggggtgttattaatattggaaaggttttatttttattgttaattttttgagttgtagtgttgttggtgtttgagtgtgagtttgttttttatttgggggttttatgattttaggttttttttttttttttttttttttttttttttgttagttagtgtgaagtattaatggataaagtagttttgggttttgaatgtaatataagattgttattttggtgtgatgaggtttaagttttagtaattaggagggatatttatagagtttattggttaaggtttgatgtggagttatattttaatgttttattagttttgttatgttttggtaattttaaagatggttagatattagttaggaagggttggagtgggtagataggtttattttttaagtaggttattagaatattagattgttatagtttgaattattaggaatttggtgatttttgtatagaaggttataagtattttttaatattgaaaaaggaagaaaaagtaatttattagttatataattttttgatagattatattgtttttgaaaaattgtttagaagaaagtagataagagtttttttaggtgtaaaagttgattaaattttaggaagtaagtgtttttgattagtataaagaaaataagagtaatgtgtgggggtgtgtgtgtgtgtgtgtgtgtgtgtgtgtgtgtgtttgtggttaaagtttgggaagaaatgttggtttagagttaaggtttaagttggaaaggttagtggaggaggttttttgttttgtagaattgttgggtattgttattgtttgtttttttagtttttatatgtaggtaggtattagataattatattattttttttagagaagtggatagatttttatgattgggagaaagtttaatgtatttgatattggtttgtaaagtgtaatgtgtatttatttttaatttttattttgatttgggatttgtttttagttgtataatagaattttgtagtgtatatattgttatttgatgttttatttgttttttaaaaataatgatattagtgagtttttttttatttatgatgttgtatagttagtgtaaaaagtattttgttttttatttattgaatgttttttttttag

SEQ ID NO: 777 - DNA, 6000 bp, Artificial Sequence
  chemically treated genomic DNA (Homo sapiens)
ttaaagaaaaaatatttaataaatgggaaataaaatgttttttatattgattatatagtattatggataggaagagatttattgatattattatttttaaaaagtagataaaatattaaatagtagtgtgtatattgtagagttttgttatgtaattaagaataggttttaagttaagatgaaagttaaaagtaaatgtatattatattttgtaagttagtattagatatattaaatttttttttaattataaaaatttatttatttttttggaaaaagtaatatgattatttagtatttatttgtatataaaagttgaagaggtaagtagtgataatatttagtagttttgtaaggtagggagttttttttattggtttttttaatttaaattttaattttgaattaatatttttttttaaattttagttgtaggtatgtgtgtgtatatatatatatatatatatatatttttatatattatttttattttttttatattggttaaaaatatttgttttttaaagtttaattaatttttgtatttaagaaaatttttatttgtttttttttaaatggttttttaagaatagtgtaatttgttaaaaagttgtatagttagtgagttgtttttttttttttttttaatgttaaaagatatttgtggttttttgtgtagaagttattaaatttttagtaatttaaattgtgataatttaatattttaataatttgtttaagaaatgaatttgtttgtttattttaattttttttagttaatatttaattatttttaaggttgttaaaatgtaatagaattaatgaagtattaaaatataattttatattaagttttgattaataagttttgtgaatattttttttgattattaaaatttgagttttattatattaaaatgataattttatgttgtatttaaaatttggaattgttttatttattggtattttgtattggttgataaagaggaaaagaagagaaaaaagaaaaaaaatttaaaattatgaagtttttaaataaagagtagatttatatttggatattaatagtgttgtagtttaagggattaatggtggaagtgagatttttttgatattaatagtgttttgggaaatagaagaatttttttaaatttagttgatatatattttgtatttaatatgtaatagttattttgtatatatttttgtattttaggttttaattttggttattaaagtgtatttttgtataggagtgtttggttagaggttttttgttttttttgttttgtgatttgaggggtagtttttgagtttaggttagagttgtggtttttagagaattgtttatgatattttagttttgggttgtaggttttttggttttttttagttggttttatattgttgggtaggttttttttgttttgttttatgttttaaaagttggatttttgggtggttttaagattttattaaatatgtttttaataatttgtttaagtttggttggtaataaatgttgagttagggttttagtgattaattgttttgaggtgtattttttttattttggaagaggagggtggtaaattttggaaggtgggggttaggggatgagttttggggattattgttgttttgtttgttttgggaagggtttgggtagtgattttggttgtagttggagggttatgggggaagggagtgtttttttttgtaatatgaaggtagtggttagggtgtttttttttggtgaggggttttggaaaattgtagtaaggtgatagtggggattttttgaagtgtgtggtgatggagggtgggaggaagtttgagtttgttggtaattttgggggtaaatgtgattggtggtgtgtaggattagtttgtaggaggatgggggaaatgggagttaggatggtggggattttataggatgttggttgtgtgtgggggtagtgttgtttggtggttaggagatgttggaggtggggagggttggtggttagtttgtttttttttggtggggttttgtagaaggagaagttgttgttagtgataggaagagagttgtggtagttgtgtatatatgtattgttttttttgtttgagtatatatatttggggttgttgttgtttatttattttgtttgttggttttttttttttgtggggtttgtgttgtagtggtggttttttgtttgtttggttttgattggtttttagtttggttgtgatttgttggttgtgtttgatttgtgtttgttgtttttgatagttagtttgttgtttttgttgttgttgttgttttttttaattttgttttagttgttggtgatttttttttgtgtgtttgtagttttagtgtttggtgttagttttgtttttggtttggttttgtgtgttttgtttttgagtttatattaattagagtttgtggttttgtttttttttgtttgtatggtttgggtttttgagttggtggttggtagtgggggagtgagtttaggtttggtggattttttttgttattgtttttgttttttgttttttagttgtggggatgttttgggtggttgtgttgtgtgttgtttttgttgtggagtgttttggttttatatgttttgggtttgtttggttgttgggtgttttttagtgtagaggtggaggggtttggggaggttgaagataagtttagatttttttggaggttggttgtgtttttaatttgagtgttttttagttaattttaggtttttttgagtttttagtgttttagtagagtggttggggtggggaggatttggattttagagtttgttaaagtggagaggttttgtaatttttggttttgttagtattgttttttgagtgggtggaaaatttgtggtatttgtttggtgttttgggggtgaaggaggggtgaaagggtgaattggagggatgggtgtttgtagtttgttgttggttaattttggtagtttggtattgttgtttttgggagttaggtggatttgtgagaagggaagagagttttttgagggtgtatgttggttgatggtttttagttttgagatgatagagtaaatggaggttatttaggtagattatgggttttttggtgtttgtggagttgggggtggggttggtggggggtggggttggtgtgggtggggggggtggggaagtgtaggtgaattatattgttttttaaaggtgttagttttgaaatgtatattttttaagtaataattatttaagttgttttagaaaaatttgatgttggtttaaattttttattgatggtaagatggaatgttagtattatgtgtgttatttttttatattaaaatatgtgagaatttgttttttaaaagttttttttagatttttttttttgtagtttaaagttttgtatttgtttattttgtttgtttaaagtttttttatagtttttttttagtttttttgtaagaaaatttttaaaaataaatatataaaatttaagtatttggtttttgtaaaatgttgaatttggtggtttatttttgtggatgttggaagtagagggaagaatgttttaaaatttattgtttatttttaaaaaatattatttttaaaggtgatttatttaatagaaaagtaagttttattttaggttatttagatattggtgtttttattattttaagatgttttttgtagaggtgatataaaaataggtagttatttatattatgtttaagaatatattttatttgaaagtaaataggaaatttattaaggtattttttttatatttattgtgtgaaatgaaggattttatgtattttttgtttgtaaatggaatgatatattttgttttgtagtagaattattttgatttaatttaataagttgagatgaaattgttgtgatttttttagtattttttttaggttttgttttgaataaattttaatagtgaaaattttgttagttattttttttttttggagatagttggaaagagttttatgtattattgtagtgggattttgtttatttgtaaatttaaaaataataaaatttttaaatgtatttttttatttagatatagtttttagtaatttatttttagtatatattgtattttttttatgtttttttattataaagagtgttttaagggaagaaaataaggttttttttttatatattaaataaatttagtattttatttgttttaaattgatgatatttttttatattattagtattagtatttttatttatttttatttttaattgatttttatgaaataaaagtaaaggtaataaaatagtagtatttaagtttttttaaaaataatttttttatttaataaaatttagtttagaatttttaaatataattataagataagaagttatgtaataagattaagaggtttattgtattattttttttttttttgtttagaatttttggatttttggattagaaatatttggattttttgagaatttgttggaaatttaaattgtttttattgaattaggaatgttgagggtggagtttagtaatttgtattttaataagttttttaagtgatttgatgtatgttttatggttttagaattattattttaaggtttttggaaatattgattgaaaatttttgtaataaaatatttatattaagtatttaaatattatggtttaattagtaatggttaaattgttggttagtaggtagtgatattagtaaggagtttgaaatagtagaagatgtataatttgtaatgaaaggggtgatataggggtgttatatataaggtataagaagttaaggattttttaatgttaagaaaggttgagtagttataggttgagaaagaattttttttaaagtatggtaggatatttttatttggtattattattttagttatattaatattgtgagtgttagaattagtttttattagatttgaaatttaagaatgtattttagggtttaaagttaatgtgaaatataaatggtttagatttttattttttaagtgaggtttatagattagtagttttggtattatgtaagagtttgttagaaaggtagaattttaggttttattttaggtatatttaattaaaatttgtattttaataagattattaggtgatttttatgtaagttaaattttgagaagttttattttagataggggtttttagttttttttatatattgtaaatatttgaggagtttataaaaattttaatatttggtttgtattttagatggattatattaaaatttttggggtgaaatgtaggtattagtaattttttaagttttttatattattttagtgggaagttagattttaggaattattgttttggaggagttatttaagaaaggtgttattaggaaagttttttgggtatagtagagtataaatggttggttttaaagtgggtagttgaattagagtttagttaattgttgttgtataggaatgtgagtttaaattttttaatttttttagagaagttgaaaatatagatttttatggattattttttaattattgaatgttggtaatgaatttaattttttttagaaatataggttaggttatatttgtgtgatttttttgaaatgtgggttaggttagtgtgatgttatgatgttgtatattataaaataaagtgggaaaaaaaaattatttaagaagagtattggttttttggaatgtaagttttatgatttaaagagttaagtgttttaaatgttttgttttttaatagaattaaatattgtaggtatttaatgattgggaattggtaatgggtgagatattaatgtttgtaattttggggtaaaatattatggttttttatgtaatatttttatttttttttttttttgtttgttaattgatgtgttgggggtgggaaagtagaatgaatttttgtattatttagattaaaatttgtatttattg

SEQ ID NO: 778 - DNA, 6000 bp, Artificial Sequence
  chemically treated genomic DNA (Homo sapiens)
agagtttgatttataaattttgttttaaatgttttgggtttggtttttaatttagattaaaggtaagtattaaggtagagggaaatgatatttaaagagttttatttgtttttgatttaatttttattggtttaaaatgtggtttgatattagagggttgttttaaaggtgaaaaatgaaattttgaaaaattatatgtttgtagatgtgtagaattaaatgggtaagttatattaggttttgttaaataatagttttatttgtgttttgagagatataggtattttggtatgtatgtgtttaggaggggtatatagttagttttatttttgtttttatagtgtagatgtttttttgttttaagggataaagatttgagggagaattgtaggggggattattttattttgttaagtagtggggatgtttttattagaaatttggtagaatgtgttagagtttatatatatgtaaatttgggtttatttatatatttaaatggatgttttttttagtataatgttagttaagattagtggatatggagtaaataatttgaattattttaaaaggttttttgttttaagttgttttaagttaaaattatgaagagaggtatttattttatttttagatgaagattttggttaatttttgttgtttatttttttttttatggtttttgtttataaatgatgtttagaaaaagaagaagttttttaggttgaaagttgtttgtgtaatatttgttatttgatggtgatttgtatatatgaaatatagtatttagtttgtaatttttgaatagtttaaggattaagagatatttttttaattatatttgttgagaagtgaaataatgggttgtatttgtttttgaaatgagttttatgaaattttgaggaaagggagaatgatatatattgttttaaagaatttagaaggtaaagttagttttttagtgtgtttaggtttttgaggttttagagaaatgttgatattaaaataaaagtttttttataatattagtagttttgtgaaaattgtatttttgatttattaattagtgagttatatagattaagtgatagtaatataattatgtatattagttggtgttaaatttggatatatgaaatatatagaaagttgatggtttttttttaaagtaggaattattgatttagttttattagtagagggtttttttttttaagttaataaagaatatgtgttttgtagattattttttaaatattaaaatttaatgggaaaaagatttagtttatatttttttaatataataggatttttttggtagatgattgtatatattgtgagaaatttgtttaaggtaaagtttttttaatttattttaagattttttatatgttgagagagtattgttttttagtggtttatttttttttgaaatagaaaatatattggtggatttaatagagtattttaattttagaaggttttgatatgaaatattatgtgaatttagataggtatgtttaggagattgatgtttttaatgtttttagttttagaaaggttatttttaaaagtagggtaagattatgtagtttaggatgtaagggtattttttgaattaattatatgtttttatgattagatggtagatttatttatagattgttatttttattgggaaagttttttaatattatattagttgtattaaaggaaagtttgtaaaattatttttattgtgggtttaatagtattttttagatattttaagtaattttgaagttagttgttgttgttggtttgtgtggattttatgtgattattggattatttttttatgtagagtatgagggtattattgaaagaatttatgtttttaaagggaatgaaatgttttgttttaatttaagtaagttaaaaatagaaaatagaaaaaattagagttttgttaggggtgtgaaattttttgtatgtggtttaaaagattaattttagttttgtttatttttttttatgttttttagtaaagggaagtgaggagtagggataatgggtagagaagggtatttgaaattattagaagattgggttttagttttagggttataattttttgtaaattattttatttttttgggttagattttgtttttttttttatggtatgtaggaattgattgaagtgaattttaaattattttttggtgtaaagtttggtgatttttttggataattttaaagttatttatgtttatgtaattgaaaatttttttagattaaattttaattaaatagtagttagtaattttaagtttggtttattgttatttttttaaataaagggtaaatatttgtttagaaaggtatgtttttttttgtttttttattttttattttattagttggtatataaatttaatgtagagatattttttaattagtaggttatatggttatttaaatgtgagttgtaattgattttataaaaatagttgtagtgttgttttattttgaattgttatatgattatggagtatagtatgtatatggtgtggggtttaatatttgtttgaggatgtttttttattatttattattgaatatttttgtaattttttttttgtttgagttgtttataagggtttttttgttatatttgtagggttgtttgtgttggtgtgtgggaggaggtgtaagaggtggatatgagtgaggtgttgtgttttgggttgttttaagaggtttaggtttttataagtgaggttttgattttattttttgttgaattagtttagttattttttgtgtttggttgtgtatagtgttttgttttattgttggttatttgagttttgtgagttagttagtgtgtttagtagttagtgagattattttaggtttttttataatggtttttttattttttaggtgaaaatgagtaagttggttttgtattggttatttgttagttgatgataattttgatttgggttttttttttttttttgaaatttttagtttagtaaatatttgaatttgtttaagttaattatgaagttgtgatttttatttaagggagatgtgtgagtgtttgggttttttttttttttgatatagtagtgaaatttagttggttttttaatgaggagttggtagtgagtggtggtggtttggatgtattgttgggtggggtgtggggtggagggatgagttgagttgagttaagtggagttgggttattgtgtatgtttggagggttttggtggtgtttttgtttttgtgtgtatttttggtgttggatatgagtattgtttgttgggaataggttggggggaggtgtgggggtttggtttatttggtggaagaatagttttggggatttttttttttttattgttggatataggtattttaaagggaaattgttgaaatgtataatttgtaaagtaagttgttttgaatttgtgtatttttttgttttttatttgagtggtgtttttttgtagtttgttttggagtatgtgtgtgtgtgtgtgtttttgtaagtgttgtttggggaggatagatgggagattaggggagatattttttttgtttttgagggggatagtggttgggaaagatagggtttaggttggaattttagtaagaaggtattaattataatgtgtttggttggaagttggtgttaggttagggtttggagagattatgggaaaattatttgtttttttgttttttttttgagttagtttgttatagaagatttaatagttagattggtttgtattgatggtttttaaatgtatggattggtattttgggttgttatatttgttatagttgtttggagaatttgtttttttgttttgggggagggttgatattttaattaaattaaaaaagaatgtttttttgaattttagggtatatagttatttttattatttttatttgaatttgagtttaggtaaatttaggtaaatagaaaagtgggagagggtgggaagagataaggtgagtttgttttttttaatattgggaaaatgaattaaattagatgggggatgttagagaatagaatgttttgtttttggtttgttttttaatatattttatgattttaaattttatagaaagttttaagggtttttgtgttttttaaatggttaaatatgtgatatatatgtgtatatagattatagagttttattgtagttttttaaatgagttatatttattttggggaagagtttttttttttttgttattataatattgtgaatgtaaagagagattggtttataatgagaatgtatagtaggtttttataagggtgataggattatatgtagaatgattttgaagagttaaaattgatttatttatgttaagtagtgttaagaaggaatatttgttttggagtgaggtatttgagatagagggggaaaagtaaaaaaaaaaaaaaaaaaaaaaaaaaagtgattatattatttttttgtttaagtagtattagtagtgaagatgggtttattagtgaaatattttgtaaagataaatatatttttattttgtattttgatttatagtttttttttttttggaagaagtattttttttgtttagtttttttaggtagttatattaaaatttttattaataatgttgatagataattatgtttattatttttgttaataggtatttgtatttttatttagaatttttattgttagtttataaagtttagttttaattttggaatgtttggtagaggaggatatttatatatttttttttaattgttttttttaatgtggtatatttgtgatagtgtttgaattttgggtttttagtgaattatggaggattaaaatattaggagtagtttgtattgttttttttatatatgagagatatttaaggattataaaatataatttaagtatatttttttaatgtttttgtaagatttttaaattaaggaatgattgggttatttataaatttagatgtattaagtggggagaaaagtttggagttgtagtatattagtttttgttaatttgttaatagtagagtgtattatgttgtaaggagtaataaataaggaattagaaaatttgttgttggagaatagttaaattaaatatttttttgaaaggatgagtatgtatatattgtagttttattaaatgtagttttttagtgaggttggtattatgttaaggttggtatggaagagaattgatgaagtaggagtggtttggtgatatttttttgatttgattggttggggtgtgtgatgtaataggttttagtgtagttttttataggttttaaaatgaattttaagatattattataaagaaagttggattttttttttataattgagtttagttaaggaaatttttgtataaatgtataatattgtttggaatatggaagatttggatttagaatatgttaagatagatataaattgtggtatagatttgatgttttatatagaaatggatttattaggtaatattgtagtattattgtagagagttagttaattttgtggttttttaattttttgaaagttattgtaaaagattttttttggatttttgtttttattaatttgttttattgataaaaattagtttgtttatggtttaaaaattaaatagattgtttgattgtttgtggaagtaagtagtttaggttgtgtgtggtaaatgtttatttttatttgaatggatatgaattgaattttagttttttattggtgttttttgttaattgagatttttttttgggtgagttatgttgtgggatattgtttttgtaattaaaatgatgtattttttgtgttgtttttttttgttgttagtggatgagaatagtgtagtattttgtagtgataatatttggtattttagaaagtatgtaaaatgtagtagtgattataatttagttttttaaatgttgagattttgtttgtttttt

SEQ ID NO: 779 - DNA, 6000 bp, Artificial Sequence
  chemically treated genomic DNA (Homo sapiens)
agagagtaagtaaagttttaatatttagagaattgagttgtaattattgttatattttatatgttttttaaagtattaagtgttattattgtaaagtgttatattgtttttatttattggtaatagagaaaagtagtataaaagatgtattattttaattatagggataatattttataatataatttatttagggaaggattttgattaataaaagatattagtgaaaaattggagtttaatttatatttatttaagtaagaataagtatttattatatatagtttgagttgtttgtttttatagatagttaaataatttgtttaatttttaagttatgagtaaattaatttttattaatgaaataaattaataaaaatagaaatttaaaaaggattttttatagtagtttttgaaaaattaaaaagttatgaaattaattaattttttataataatattgtagtattatttggtgggtttatttttatataaaatattaagtttgtgttataatttatatttgttttggtatattttaaatttaggttttttatattttaaatagtattgtatatttgtgtaagagtttttttggttgagtttagttataagaaaagagtttggttttttttgtaatggtgttttggaatttattttaaaatttataaggggttgtattgaaatttattatattatatgttttagttaattaagttagaaaaatgttattagattatttttgttttattagtttttttttatattagttttaatataatgttaattttattaagaagttatatttaatagaattgtaatatatatatgtttatttttttaaaaaggtgtttaatttgattgttttttagtagtgagttttttaattttttgtttattattttttgtagtatggtatgttttgttgttggtaggttgataaaagttgatatgttgtagttttgagtttttttttttatttagtgtatttgggtttatagatagtttagttattttttggtttaaaaattttataaaggtattaaaagggtatatttaagttatgttttatagtttttagatattttttatgtataagagaagtagtatggattatttttggtattttagttttttataatttattgaaaatttagaatttaaatattgttataaatgtattatattagaaaggatagttaaaagaaaatgtatagatgtttttttttattaaatattttaaagttaaaattagattttatagattaataatgaaaattttgaataggaatgtagatgtttattagtagaaataataaatgtaattgtttgttaatattattaatgagaattttaatgtgattgtttaaaaaaattgggtaaagaaaatgttttttttaaaaagaaagaggttatagattagaatgtagagtggaggtatatttatttttgtaaaatattttattgatgaatttatttttgttattaatattgtttgaatgggaagatgatgtaattattttttttttttttttttttttttttttgtttttttttttttattttaaatgttttattttgggataaatatttttttttagtattatttaatataaataaattaattttggttttttaaagttattttgtatataattttgttatttttataggagtttattgtatatttttattgtgaattaatttttttttatatttataatattatgatggtggggggggaggggtttttttttaaggtaaatgtggtttatttaaaaaattatagtggggttttgtgatttatgtatatatgtatgttatatatttgattatttaaaaaatatagaaatttttgagattttttgtaaaatttgggattataaaatatattaaaaagtagattaaaggtaaggtattttgttttttgatgttttttgtttagtttaatttatttttttagtattgggaaaagtaggtttattttgtttttttttatttttttttatttttttatttgtttaagtttatttgaatttaaatttaaataaaaatggtaaaagtggttgtatgttttaagatttagaaaaatatttttttttagtttaattaaaatgttgatttttttttgaagtaaggagataagttttttgagtagttgtggtgggtgtaatagtttagagtgttagtttatgtatttgggaattgttggtgtaaattagtttggttgttggattttttgtggtaaattaatttagggagaaggtagggagataggtgatttttttatggtttttttaagttttggtttggtattaatttttaattaagtatgttgtaattagtatttttttattgaaattttaatttaaattttattttttttagttattgttttttttgaggatagggggagtgttttttttaattttttatttgttttttttaggtagtgtttataggggtgtatgtatatatatgtattttaagataaattatagaaaggtattgtttagataaggaatagagaagtgtataaatttaaggtaatttattttgtaggttatgtattttaatggtttttttttgaaatgtttgtatttgataatgaaaaaaaaaaaatttttaaagttgtttttttattaagtgggttaagtttttgtatttttttttagtttgtttttggtaggtagtgtttgtgtttggtgttgagagtgtgtgtaggagtgggggtgttgttaggattttttgggtgtgtatagtggtttagttttgtttggtttggtttggtttgtttttttgttttatgttttgtttggtagtgtgtttgggttattgttgtttattgttggttttttattgagaagttaattggattttgttattgtattggggaggaaaggagtttaggtgtttgtatgttttttttagataaagattgtagttttatgattaatttgggtaggtttaaatatttgttgagttagggattttgggagggggaggggagtttaagttaaagttgttattggttgataagtggttaatgtaagattaatttgtttatttttgtttgggaaatgagaaggttattgtgaggggatttaaaatagttttattggttgttgagtgtgttggttggtttgtggggtttaagtagttgatagtgaagtgaggtattatgtatagttaaatataggaagtggttgagttagtttagtaaaaaatagaattaaagttttatttgtaaaggtttgaattttttggaataatttagaatatagtgttttgtttgtgtttattttttgtatttttttttatatattagtatagatagttttgtaggtgtaataggaaagtttttgtgagtaatttgggtagggaggagattataaaaatgtttaatagtaagtagtaggagggtatttttggatgaatattaaattttatattatatgtatattatattttatgattatgtgatgatttagaataaaataatattgtggttatttttatgaggttgattgtaatttgtatttaaatggttatatgatttgttaattaaaaggtgtttttgtattaggtttatgtgttagttaatggggtaaaggatagaagggtagagaagggtatatttttttaagtggatgtttgttttttatttgagaaagtggtaatggattagatttgggattattgattattatttaattaaaatttgatttaagaaaatttttagttgtatgagtatagatagttttaaggttatttagggaaattattaaattttatattagaaagtaatttagagtttattttaattaatttttgtatgttatagaggggaaaatgaaatttgatttagggaggtgaagtggtttatagaagattatagttttaagattagaatttaattttttgatggttttaaatgtttttttttatttattgtttttgttttttatttttttttgttagagaatgtaaaaaaaaatggataaaattgaagttaattttttaagttatatgtaaaaaattttatatttttaataaaattttggttttttttgttttttatttttagtttgtttaaattaaaataaaatattttattttttttgaagatataggtttttttaataatatttttatattttgtatgggaaagtgatttagtggttatataaagtttatataggttaatagtagtaattagttttagggttatttgaaatatttggaaagtgttgttaaatttataatgaaagtgattttataaatttttttttagtgtaattgatataatattgaaaaatttttttaatggaaataatagtttataagtgaatttgttatttgattatagggatatatggttagtttagagaatatttttgtattttgagttgtataattttgttttatttttaaaaatagtttttttaaagttagaaatattggaaatattagttttttaagtatatttgtttggatttatatgatgttttatgttaaaattttttaagattaaaatgttttgttaagtttattagtatattttttgttttagaagaaaataagttattggaaagtagtatttttttaatgtatagaaagttttgaaatagattggaaaaattttgttttaaataaattttttataatatgtataattatttattaaagaggttttattatattaggaaagtgtgagttgaattttttttttgttgaattttagtgtttaaaaagtgatttgtaagatatatgttttttattagtttaaaaaagggagttttttgttggtagaattgaattagtaatttttgttttgggagaaaattattaattttttgtatattttgtatgtttaaatttgatattaattaatgtatataattgtattattgttatttgatttatatgatttattaattagtaaattaaaagtatagtttttatgaagttgttagtgttgtaggaaaatttttattttaatgttagtatttttttgggattttaaaggtttagatatattggaaaattaattttattttttggattttttaaaataatatgtattattttttttttttttaaagttttgtaaaatttattttagaggtaaatatagtttattgttttattttttagtagatatagttaggaaaatgttttttgatttttaaattgtttaaaagttataaattgaatattatattttatatgtataagttattattaagtggtaaatgttgtataagtagtttttaatttagaaaattttttttttttttggatattatttatgaataaagattatgaaaaaaagaatagataataaaaattaattaaaatttttatttaagggtaaaatgaatatttttttttataattttaatttaagataatttagaatagagggttttttagggtaatttaaattatttgttttatatttattggttttaattgatattatgttaaggaaaatatttatttaagtatataaataagtttaggtttatgtatgtataaattttgatatattttattaggtttttgataaaggtatttttattgtttagtagaataaagtagttttttttgtaatttttttttagatttttgttttttgagataaagagatatttgtattgtgaaaataaaagtaaaattgattatatattttttttaaatatatatatattaaaatatttgtgttttttaggatataaataaaattattgtttgataaaatttagtgtggtttgtttgtttagttttatgtatttataaatatgtaattttttaaagttttattttttatttttgaagtaattttttaatgttagattatattttaaattaataaaaattaaattagagataagtaaaattttttgaatgttatttttttttattttagtgtttgtttttagtttgggttgagaattaagtttagagtatttaaaataagatttatgaattaggtttt

SEQ ID NO: 780 - DNA, 24 bp, Artificial Sequence
  Detection primer for AKT1
ttttagaattttggtgtatgagaa

SEQ ID NO: 781 - DNA, 19 bp, Artificial Sequence
  Detection primer for AKT1
ccccacattcactcctaaa

SEQ ID NO: 782 - DNA, 22 bp, Artificial Sequence
  Detection primer for AKT2
atttctaacctcacccttaaaa

SEQ ID NO: 783 - DNA, 21 bp, Artificial Sequence
  Detection primer for AKT2
tttggggtaggatttattgtt

SEQ ID NO: 784 - DNA, 22 bp, Artificial Sequence
  Detection primer for BCL2
tgttttgttgtgaagataggtg

SEQ ID NO: 785 - DNA, 22 bp, Artificial Sequence
  Detection primer for BCL2
cttaataaaccccttccctaaa

SEQ ID NO: 786 - DNA, 20 bp, Artificial Sequence
  Detection primer for BRAF
ggagttggggttagaaggta

SEQ ID NO: 787 - DNA, 25 bp, Artificial Sequence
  Detection primer for BRAF
ctaccctttttcacttttctattta

SEQ ID NO: 788 - DNA, 19 bp, Artificial Sequence
  Detection primer for BRAF
taataaaccccatcatccc

SEQ ID NO: 789 - DNA, 26 bp, Artificial Sequence
  Detection primer for BRAF
attggttgaagtatttagttttgtat

SEQ ID NO: 790 - DNA, 17 bp, Artificial Sequence
  Detection primer for CBL
ggtggtttgattgggtt

SEQ ID NO: 791 - DNA, 18 bp, Artificial Sequence
  Detection primer for CBL
caacacttctccaccatc

SEQ ID NO: 792 - DNA, 19 bp, Artificial Sequence
  Detection primer for CDKN1B(p27Kip)
cccccaaaaatacctacaa

SEQ ID NO: 793 - DNA, 19 bp, Artificial Sequence
  Detection primer for CDKN1B(p27Kip)
atggttgggaaagggttat

SEQ ID NO: 794 - DNA, 20 bp, Artificial Sequence
  Detection primer for CDKN2A
cccaccctctaataaccaac

SEQ ID NO: 795 - DNA, 18 bp, Artificial Sequence
  Detection primer for CDKN2A
ggggagatttaatttggg

SEQ ID NO: 796 - DNA, 20 bp, Artificial Sequence
  Detection primer for COT(MAP3K8)
ttgggtattgggaagaatag

SEQ ID NO: 797 - DNA, 21 bp, Artificial Sequence
  Detection primer for COT(MAP3K8)
cacccactaaaaaccaaacat

SEQ ID NO: 798 - DNA, 20 bp, Artificial Sequence
  Detection primer for DAPK1
ccccactcactccctaacta

SEQ ID NO: 799 - DNA, 22 bp, Artificial Sequence
  Detection primer for DAPK1
ttttggttgggaaagtaaaagt

SEQ ID NO: 800 - DNA, 24 bp, Artificial Sequence
  Detection primer for EGFR
ctttcctatttccttaaaatcaac

SEQ ID NO: 801 - DNA, 18 bp, Artificial Sequence
  Detection primer for EGFR
tgagggaagaaagttggg

SEQ ID NO: 802 - DNA, 20 bp, Artificial Sequence
  Detection primer for ELK1
gattgatgtattgggggatt

SEQ ID NO: 803 - DNA, 22 bp, Artificial Sequence
  Detection primer for ELK1
tttctcctaacctcaactttca

SEQ ID NO: 804 - DNA, 24 bp, Artificial Sequence
  Detection primer for ERBB2
ggatggagtaggatgtaagttttt

SEQ ID NO: 805 - DNA, 20 bp, Artificial Sequence
  Detection primer for ERBB2
caactcccaacttcactttc

SEQ ID NO: 806 - DNA, 22 bp, Artificial Sequence
  Detection primer for ERBB3
cccttaacctatctcctacaaa

SEQ ID NO: 807 - DNA, 18 bp, Artificial Sequence
  Detection primer for ERBB3
agggaagggggtgagtta

SEQ ID NO: 808 - DNA, 27 bp, Artificial Sequence
  Detection primer for ERBB4
ggtagtaaatagataagtttgaaggat

SEQ ID NO: 809 - DNA, 19 bp, Artificial Sequence
  Detection primer for ERBB4
aaaccctctccccattaac

SEQ ID NO: 810 - DNA, 18 bp, Artificial Sequence
  Detection primer for FOS
ccctctccaaatacccac

SEQ ID NO: 811 - DNA, 19 bp, Artificial Sequence
  Detection primer for FOS
ggggaggtaaggtgtttta

SEQ ID NO: 812 - DNA, 18 bp, Artificial Sequence
  Detection primer for FOSL1
tcccaataaccccaattc

SEQ ID NO: 813 - DNA, 23 bp, Artificial Sequence
  Detection primer for FOSL1
ggaggttgtaggtgtttattttt

SEQ ID NO: 814 - DNA, 20 bp, Artificial Sequence
  Detection primer for FOSL2
ttattggaaggattgtgtgg

SEQ ID NO: 815 - DNA, 24 bp, Artificial Sequence
  Detection primer for FOSL2
ccctaaccaaatcttaaaaactac

SEQ ID NO: 816 - DNA, 20 bp, Artificial Sequence
  Detection primer for GSTP1
cctctcccctaccctataaa

SEQ ID NO: 817 - DNA, 26 bp, Artificial Sequence
  Detection primer for GSTP1
gggtttagggagtaaatagatagtag

SEQ ID NO: 818 - DNA, 26 bp, Artificial Sequence
  Detection primer for HRAS
attattgggttattaagagtaagtgg

SEQ ID NO: 819 - DNA, 21 bp, Artificial Sequence
  Detection primer for HRAS
ctcctacaaaatctcctaccc

SEQ ID NO: 820 - DNA, 24 bp, Artificial Sequence
  Detection primer for HRAS
gggtttgtaggttggtattagttt

SEQ ID NO: 821 - DNA, 22 bp, Artificial Sequence
  Detection primer for HRAS
ccccacttactcttaataaccc

SEQ ID NO: 822 - DNA, 20 bp, Artificial Sequence
  Detection primer for IGF2
gttttgggtgggtagagtaa

SEQ ID NO: 823 - DNA, 26 bp, Artificial Sequence
  Detection primer for IGF2
taaacaaattcttccaatataacacc

SEQ ID NO: 824 - DNA, 26 bp, Artificial Sequence
  Detection primer for JUN
cccttaaaataactctataaaatccc

SEQ ID NO: 825 - DNA, 19 bp, Artificial Sequence
  Detection primer for JUN
gaggatgaagtggggtgta

SEQ ID NO: 826 - DNA, 22 bp, Artificial Sequence
  Detection primer for JUNB
aacctttcccataaaactaaaa

SEQ ID NO: 827 - DNA, 24 bp, Artificial Sequence
  Detection primer for JUNB
agtagattaggtagttggaggaaa

SEQ ID NO: 828 - DNA, 23 bp, Artificial Sequence
  Detection primer for JUNB
aaatcaaatatctccttaaccct

SEQ ID NO: 829 - DNA, 22 bp, Artificial Sequence
  Detection primer for JUNB
ggtatatgagtgaggggtttta

SEQ ID NO: 830 - DNA, 18 bp, Artificial Sequence
  Detection primer for JUND
caacttcaacaaccccaa

SEQ ID NO: 831 - DNA, 21 bp, Artificial Sequence
  Detection primer for JUND
tgagtttgagtgagtaggtgg

SEQ ID NO: 832 - DNA, 18 bp, Artificial Sequence
  Detection primer for MDR1(ABCB1)
atacttcctcccacccac

SEQ ID NO: 833 - DNA, 22 bp, Artificial Sequence
  Detection primer for MDR1(ABCB1)
tttggtaagtttatggggatta

SEQ ID NO: 834 - DNA, 19 bp, Artificial Sequence
  Detection primer for MDR1(ABCB1)
atatggtgtggaggggtaa

SEQ ID NO: 835 - DNA, 22 bp, Artificial Sequence
  Detection primer for MDR1(ABCB1)
cctcccaaaaactaataaacaa

SEQ ID NO: 836 - DNA, 19 bp, Artificial Sequence
  Detection primer for MGMT
tttgggggtttttgattag

SEQ ID NO: 837 - DNA, 27 bp, Artificial Sequence
  Detection primer for MGMT
cctaaaactctataccttaatttacca

SEQ ID NO: 838 - DNA, 27 bp, Artificial Sequence
  Detection primer for PTEN
atctctaaacaaaaactattacaatca

SEQ ID NO: 839 - DNA, 24 bp, Artificial Sequence
  Detection primer for PTEN
tgtgtataggtgaaaaggattagg

SEQ ID NO: 840 - DNA, 19 bp, Artificial Sequence
  Detection primer for RAF1
ggtttagaaggggagagga

SEQ ID NO: 841 - DNA, 27 bp, Artificial Sequence
  Detection primer for RAF1
ttaaaattcaaaaactatccacataac

SEQ ID NO: 842 - DNA, 19 bp, Artificial Sequence
  Detection primer for RARB
ttgtttgaggattgggatg

SEQ ID NO: 843 - DNA, 23 bp, Artificial Sequence
  Detection primer for RARB
catttaccattttccaaacttac

SEQ ID NO: 844 - DNA, 24 bp, Artificial Sequence
  Detection primer for SFN
gggtgttgtttagtattgagtaga

SEQ ID NO: 845 - DNA, 22 bp, Artificial Sequence
  Detection primer for SFN
ataatcacccttcatcttcaaa

SEQ ID NO: 846 - DNA, 20 bp, Artificial Sequence
  Detection primer for SRC
actaccaaaacctccctacc

SEQ ID NO: 847 - DNA, 20 bp, Artificial Sequence
  Detection primer for SRC
tagttgggtttgtttagggg

SEQ ID NO: 848 - DNA, 22 bp, Artificial Sequence
  Detection primer for SRC
gttgagtttaaggtattgggaa

SEQ ID NO: 849 - DNA, 22 bp, Artificial Sequence
  Detection primer for SRC
aaaaaccccacaataaaactac

SEQ ID NO: 850 - DNA, 18 bp, Artificial Sequence
  Detection primer for GSK3B
ccttcaaaccccaaacaa

SEQ ID NO: 851 - DNA, 22 bp, Artificial Sequence
  Detection primer for GSK3B
ggttaagtgataaaggaaggaa

SEQ ID NO: 852 - DNA, 20 bp, Artificial Sequence
  Detection primer for ESR1
cacaccccattctatctacc

SEQ ID NO: 853 - DNA, 21 bp, Artificial Sequence
  Detection primer for ESR1
aggatttgttaaaggtggttt

SEQ ID NO: 854 - DNA, 21 bp, Artificial Sequence
  Detection primer for VEGF
aaaacccattccctctttaac

SEQ ID NO: 855 - DNA, 23 bp, Artificial Sequence
  Detection primer for VEGF
tagatttattggaattttggagt

SEQ ID NO: 856 - DNA, 19 bp, Artificial Sequence
  Detection primer for BAD
aaaaacctcccccaactta

SEQ ID NO: 857 - DNA, 24 bp, Artificial Sequence
  Detection primer for BAD
tgggtttattttagagttaaggat

SEQ ID NO: 858 - DNA, 20 bp, Artificial Sequence
  Detection primer for BCL2L1
ggagttgggatgttaggtta

SEQ ID NO: 859 - DNA, 19 bp, Artificial Sequence
  Detection primer for BCL2L1
acccccaataccatcaata

SEQ ID NO: 860 - DNA, 22 bp, Artificial Sequence
  Detection primer for BCL2L2(BCLW)
aagttgaggtagaagggttatg

SEQ ID NO: 861 - DNA, 26 bp, Artificial Sequence
  Detection primer for BCL2L2(BCLW)
aaacctaaaatcacatacaactaaac

SEQ ID NO: 862 - DNA, 20 bp, Artificial Sequence
  Detection primer for BCL2L2(BCLW)
gagaaaagatgggaaaggtt

SEQ ID NO: 863 - DNA, 22 bp, Artificial Sequence
  Detection primer for BCL2L2(BCLW)
aaacctctaaactacccaaaaa

SEQ ID NO: 864 - DNA, 18 bp, Artificial Sequence
  Detection primer for MCL1
atttccaacccaccctta

SEQ ID NO: 865 - DNA, 22 bp, Artificial Sequence
  Detection primer for MCL1
taggtttggggttattagtagg

SEQ ID NO: 866 - DNA, 27 bp, Artificial Sequence
  Detection primer for CDK6
aacttaactctcactctataaaaccaa

SEQ ID NO: 867 - DNA, 22 bp, Artificial Sequence
  Detection primer for CDK6
gtgttgaggtatttggagattt

SEQ ID NO: 868 - DNA, 27 bp, Artificial Sequence
  Detection primer for PDPK1
agagaagtagaaggtgtaagtttttgt

SEQ ID NO: 869 - DNA, 20 bp, Artificial Sequence
  Detection primer for PDPK1
taatccttcccctaaaatcc

SEQ ID NO: 870 - DNA, 24 bp, Artificial Sequence
  Detection primer for PIK3CA
tttatgtttagagttggagtttga

SEQ ID NO: 871 - DNA, 23 bp, Artificial Sequence
  Detection primer for PIK3CA
tcaataatttaccttaccaatcc

SEQ ID NO: 872 - DNA, 24 bp, Artificial Sequence
  Detection primer for PIK3CA
gggtagagatagataataagggat

SEQ ID NO: 873 - DNA, 21 bp, Artificial Sequence
  Detection primer for PIK3CA
aaaactcacacacaaacctaa

SEQ ID NO: 874 - DNA, 18 bp, Artificial Sequence
  Detection primer for MAPK1
gtgagagatggttggggt

SEQ ID NO: 875 - DNA, 27 bp, Artificial Sequence
  Detection primer for MAPK1
tatttcacactttctcaatatacaaat

SEQ ID NO: 876 - DNA, 23 bp, Artificial Sequence
  Detection primer for RPS6KA2
ctaaatctaaaacaaaaccctca

SEQ ID NO: 877 - DNA, 27 bp, Artificial Sequence
  Detection primer for RPS6KA2
tgtataagaggaaaatagagtaggttg

SEQ ID NO: 878 - DNA, 22 bp, Artificial Sequence
  Detection primer for EREG
ttcattcctcaaccactactct

SEQ ID NO: 879 - DNA, 22 bp, Artificial Sequence
  Detection primer for EREG
tgagtttaattgtttggtgttg

SEQ ID NO: 880 - DNA, 19 bp, Artificial Sequence
  Detection primer for RASSF1
aatttgggtgtagggattg

SEQ ID NO: 881 - DNA, 25 bp, Artificial Sequence
  Detection primer for RASSF1
aatataaaaaccctcttcctctaac

SEQ ID NO: 882 - DNA, 21 bp, Artificial Sequence
  Detection primer for ERCC1
ggagttttaagggaaagattg

SEQ ID NO: 883 - DNA, 18 bp, Artificial Sequence
  Detection primer for ERCC1
caaatcctcaaaccacat

SEQ ID NO: 884 - DNA, 25 bp, Artificial Sequence
  Detection primer for IGF1R
ttaaggatgtattatttttaagggt

SEQ ID NO: 885 - DNA, 26 bp, Artificial Sequence
  Detection primer for IGF1R
caaattacctttcaatctattcttta

SEQ ID NO: 886 - DNA, 21 bp, Artificial Sequence
  Detection primer for IGF1R
gtggagtaggtggtaaagagg

SEQ ID NO: 887 - DNA, 21 bp, Artificial Sequence
  Detection primer for IGF1R
ccaatcccacaattactacaa

SEQ ID NO: 888 - DNA, 22 bp, Artificial Sequence
  Detection primer for PIK3R2
cctccattaaacactaaacaca

SEQ ID NO: 889 - DNA, 19 bp, Artificial Sequence
  Detection primer for PIK3R2
ttggtggattagagggtgt

SEQ ID NO: 890 - DNA, 24 bp, Artificial Sequence
  Detection primer for GSS(GSH)
caaaacttaaaccaatacctaaaa

SEQ ID NO: 891 - DNA, 18 bp, Artificial Sequence
  Detection primer for GSS(GSH)
gtttagtgagggggttgg

SEQ ID NO: 892 - DNA, 22 bp, Artificial Sequence
  Detection primer for EGF
gggtgagtttttaatttgttgt

SEQ ID NO: 893 - DNA, 22 bp, Artificial Sequence
  Detection primer for EGF
actatattttccccctcaatct

SEQ ID NO: 894 - DNA, 24 bp, Artificial Sequence
  Detection primer for EGF
agtatgagagggagtagattttgt

SEQ ID NO: 895 - DNA, 17 bp, Artificial Sequence
  Detection primer for EGF
taacctcccacctaacc

SEQ ID NO: 896 - DNA, 22 bp, Artificial Sequence
  Detection primer for IGF1
atattgagagggagggttattt

SEQ ID NO: 897 - DNA, 22 bp, Artificial Sequence
  Detection primer for IGF1
atacctactcaccttcaccaac

SEQ ID NO: 898 - DNA, 23 bp, Artificial Sequence
  Detection primer for IGF1
tggagttatttatttgattaggg

SEQ ID NO: 899 - DNA, 24 bp, Artificial Sequence
  Detection primer for IGF1
caacaaaattatatccttcaaaac

SEQ ID NO: 900 - DNA, 26 bp, Artificial Sequence
  Detection primer for STAT1
ttgttattttgtgttttaataagggt

SEQ ID NO: 901 - DNA, 22 bp, Artificial Sequence
  Detection primer for STAT1
aacactacaccttcccatttac

SEQ ID NO: 902 - DNA, 22 bp, Artificial Sequence
  Detection primer for STAT1
aaaaccttacccttacacttcc

SEQ ID NO: 903 - DNA, 22 bp, Artificial Sequence
  Detection primer for STAT1
gggtagttatttaggttggttg

SEQ ID NO: 904 - DNA, 19 bp, Artificial Sequence
  Detection primer for STAT5A
cccaaatcctcaaccctat

SEQ ID NO: 905 - DNA, 20 bp, Artificial Sequence
  Detection primer for STAT5A
tgggaaggggagatatttta

SEQ ID NO: 906 - DNA, 20 bp, Artificial Sequence
  Detection primer for ADAM10
aggaatggtgagtaggatga

SEQ ID NO: 907 - DNA, 24 bp, Artificial Sequence
  Detection primer for ADAM10
ctaataactacatccctccaatct

SEQ ID NO: 908 - DNA, 22 bp, Artificial Sequence
  Detection primer for AREG
tgtttttagggagtgagatttt

SEQ ID NO: 909 - DNA, 22 bp, Artificial Sequence
  Detection primer for AREG
actttatcccctactcacctct

SEQ ID NO: 910 - DNA, 20 bp, Artificial Sequence
  Detection primer for AREG
tttgagtttggtttttgttt

SEQ ID NO: 911 - DNA, 21 bp, Artificial Sequence
  Detection primer for AREG
acatctacccttctcttttcc

SEQ ID NO: 912 - DNA, 27 bp, Artificial Sequence
  Detection primer for CDK4
ttattatgtgattagttgttaaagagg

SEQ ID NO: 913 - DNA, 21 bp, Artificial Sequence
  Detection primer for CDK4
accacacctctactcctcaaa

SEQ ID NO: 914 - DNA, 18 bp, Artificial Sequence
  Detection primer for DTR(HB-EGF)
cacacccacctctcaaaa

SEQ ID NO: 915 - DNA, 22 bp, Artificial Sequence
  Detection primer for DTR(HB-EGF)
agagggttagttgttggaatta

SEQ ID NO: 916 - DNA, 23 bp, Artificial Sequence
  Detection primer for GP1BB
taaatcaaataaaaaccctccaa

SEQ ID NO: 917 - DNA, 18 bp, Artificial Sequence
  Detection primer for GP1BB
gtgttggggagaagaggt

SEQ ID NO: 918 - DNA, 23 bp, Artificial Sequence
  Detection primer for PIK3CB
aataaggtgaaaggagaagaaat

SEQ ID NO: 919 - DNA, 26 bp, Artificial Sequence
  Detection primer for PIK3CB
aaaacacataatatctaataatccca

SEQ ID NO: 920 - DNA, 20 bp, Artificial Sequence
  Detection primer for PIK3CB
ttgattgggagatgaggtaa

SEQ ID NO: 921 - DNA, 20 bp, Artificial Sequence
  Detection primer for PIK3CB
acaatcccacaccttaaaaa

SEQ ID NO: 922 - DNA, 24 bp, Artificial Sequence
  Detection primer for PLCG1
gtgtagaggaagagaagtttttga

SEQ ID NO: 923 - DNA, 26 bp, Artificial Sequence
  Detection primer for PLCG1
ctatccaataatctaacctacaactc

SEQ ID NO: 924 - DNA, 24 bp, Artificial Sequence
  Detection primer for PTPRCAP(RPS6KB2)
tctccaacaaaactaaaaattaca

SEQ ID NO: 925 - DNA, 18 bp, Artificial Sequence
  Detection primer for PTPRCAP(RPS6KB2)
tggtggggaataaagatg

SEQ ID NO: 926 - DNA, 23 bp, Artificial Sequence
  Detection primer for MAP2K1
ctacctctcctctaaacacaaaa

SEQ ID NO: 927 - DNA, 24 bp, Artificial Sequence
  Detection primer for MAP2K1
aggtaagtaggtggatttagttga

SEQ ID NO: 928 - DNA, 19 bp, Artificial Sequence
  Detection primer for STK15(STK6)
ttcatcaattcacccactc

SEQ ID NO: 929 - DNA, 22 bp, Artificial Sequence
  Detection primer for STK15(STK6)
ggttttagattggattttgttt

SEQ ID NO: 930 - DNA, 21 bp, Artificial Sequence
  Detection primer for BTC
ccctcttatccaaataccaac

SEQ ID NO: 931 - DNA, 21 bp, Artificial Sequence
  Detection primer for BTC
aagaaggagggagatttgttt

SEQ ID NO: 932 - DNA, 24 bp, Artificial Sequence
  Detection primer for BTC
ttatttagggtaagggttaggagt

SEQ ID NO: 933 - DNA, 21 bp, Artificial Sequence
  Detection primer for BTC
ttaatttccaaacaccctctc

SEQ ID NO: 934 - DNA, 25 bp, Artificial Sequence
  Detection primer for FOXF1
ctcaaacccatatacaacataataa

SEQ ID NO: 935 - DNA, 19 bp, Artificial Sequence
  Detection primer for FOXF1
tggaaggtaggtggggtat

SEQ ID NO: 936 - DNA, 19 bp, Artificial Sequence
  Detection primer for NOTCH3
ataattcccacaacccaac

SEQ ID NO: 937 - DNA, 22 bp, Artificial Sequence
  Detection primer for NOTCH3
gggaaaagtgtgattttatttg

SEQ ID NO: 938 - DNA, 22 bp, Artificial Sequence
  Detection primer for CSNK2A1
atttaggttatttttgggatgg

SEQ ID NO: 939 - DNA, 23 bp, Artificial Sequence
  Detection primer for CSNK2A1
aatccattttacaaactcaaatc

SEQ ID NO: 940 - DNA, 18 bp, Artificial Sequence
  Detection primer for SHC1
ggaatggagaggaggatg

SEQ ID NO: 941 - DNA, 23 bp, Artificial Sequence
  Detection primer for SHC1
ctccaaaacataaacaaactaaa

SEQ ID NO: 942 - DNA, 18 bp, Artificial Sequence
  Detection primer for SHC1
tgaggtagagggttaggg

SEQ ID NO: 943 - DNA, 20 bp, Artificial Sequence
  Detection primer for SHC1
aaaaatcaaaactcaccaaa

SEQ ID NO: 944 - DNA, 21 bp, Artificial Sequence
  Detection primer for RPS6KA1
ggggttaagaggagtaatttt

SEQ ID NO: 945 - DNA, 17 bp, Artificial Sequence
  Detection primer for RPS6KA1
caccccacacctaaaac

SEQ ID NO: 946 - DNA, 17 bp, Artificial Sequence
  Detection primer for RPS6KA1
ggtttgtgagaggggaa

SEQ ID NO: 947 - DNA, 19 bp, Artificial Sequence
  Detection primer for RPS6KA1
accaaacaacaatacccaa

SEQ ID NO: 948 - DNA, 20 bp, Artificial Sequence
  Detection primer for TGFA
gggaggagttttatggtttt

SEQ ID NO: 949 - DNA, 21 bp, Artificial Sequence
  Detection primer for TGFA
cctcctaaccaattcttaccc

SEQ ID NO: 950 - DNA, 27 bp, Artificial Sequence
  Detection primer for ABCC6
tttggatttagtaatttttaggagttt

SEQ ID NO: 951 - DNA, 22 bp, Artificial Sequence
  Detection primer for ABCC6
aaatataaccctaccaacccat

SEQ ID NO: 952 - DNA, 23 bp, Artificial Sequence
  Detection primer for RPS6KA4
aaataaaacctacatccccttta

SEQ ID NO: 953 - DNA, 21 bp, Artificial Sequence
  Detection primer for RPS6KA4
tttttggtaggagtgagaagg

SEQ ID NO: 954 - DNA, 20 bp, Artificial Sequence
  Detection primer for RPS6KA3
gggaatgagggagaatagtg

SEQ ID NO: 955 - DNA, 23 bp, Artificial Sequence
  Detection primer for RPS6KA3
atttcccaacatataaccctaaa

SEQ ID NO: 956 - DNA, 23 bp, Artificial Sequence
  Detection primer for STK12(AURKB)
ataggaggttagtttatttgggg

SEQ ID NO: 957 - DNA, 23 bp, Artificial Sequence
  Detection primer for STK12(AURKB)
ctcttccattaaattcccataac

SEQ ID NO: 958 - DNA, 24 bp, Artificial Sequence
  Detection primer for ABCG2
actacatacccactttcaaataaa

SEQ ID NO: 959 - DNA, 22 bp, Artificial Sequence
  Detection primer for ABCG2
tgagattttgagtttttggtta

SEQ ID NO: 960 - DNA, 21 bp, Artificial Sequence
  Detection primer for RASGRP2
gttaatagggaggaatttggg

SEQ ID NO: 961 - DNA, 27 bp, Artificial Sequence
  Detection primer for RASGRP2
ttctaaatcttacattaccaaaactaa

SEQ ID NO: 962 - DNA, 26 bp, Artificial Sequence
  Detection primer for ABCC4
tataaagaggtaaaaggagagttttg

SEQ ID NO: 963 - DNA, 21 bp, Artificial Sequence
  Detection primer for ABCC4
atctcccaataatatccccac

SEQ ID NO: 964 - DNA, 27 bp, Artificial Sequence
  Detection primer for RASGRP1
agatagttgtgaagttgttttaatttg

SEQ ID NO: 965 - DNA, 22 bp, Artificial Sequence
  Detection primer for RASGRP1
cccctcttaaccaaatcttcta

SEQ ID NO: 966 - DNA, 18 bp, Artificial Sequence
  Detection primer for RASGRP1
ctcccctccaaaacctct

SEQ ID NO: 967 - DNA, 27 bp, Artificial Sequence
  Detection primer for RASGRP1
agattttagggtataggttaaggtaat

SEQ ID NO: 968 - DNA, 20 bp, Artificial Sequence
  Detection primer for ADAM9
gttggaaaatgatggaagag

SEQ ID NO: 969 - DNA, 18 bp, Artificial Sequence
  Detection primer for ADAM9
ctcccaaacaccacaaat

SEQ ID NO: 970 - DNA, 18 bp, Artificial Sequence
  Detection primer for RASGRF1
ccaactaaaaacccacca

SEQ ID NO: 971 - DNA, 21 bp, Artificial Sequence
  Detection primer for RASGRF1
tttaggtatgggaagggtaag

SEQ ID NO: 972 - DNA, 22 bp, Artificial Sequence
  Detection primer for AKT3
aatcattcctaactatcccaaa

SEQ ID NO: 973 - DNA, 22 bp, Artificial Sequence
  Detection primer for AKT3
aaaaagggtgtgattttaagag

SEQ ID NO: 974 - DNA, 24 bp, Artificial Sequence
  Detection primer for NRG1
tttagagtttagggtaagggatag

SEQ ID NO: 975 - DNA, 20 bp, Artificial Sequence
  Detection primer for NRG1
tataacccaaatcccactcc

SEQ ID NO: 976 - DNA, 18 bp, Artificial Sequence
  Detection primer for MVP
gaggggttgataggggat

SEQ ID NO: 977 - DNA, 22 bp, Artificial Sequence
  Detection primer for MVP
aacaaaatccaaactctcaaat

SEQ ID NO: 978 - DNA, 21 bp, Artificial Sequence
  Detection primer for ABCC1
atattttaggtaggtaggggg

SEQ ID NO: 979 - DNA, 21 bp, Artificial Sequence
  Detection primer for ABCC1
caaatcctccaaaacttaaac

SEQ ID NO: 980 - DNA, 18 bp, Artificial Sequence
  Detection primer for ABCC5
ggagattagggggaggtt

SEQ ID NO: 981 - DNA, 19 bp, Artificial Sequence
  Detection primer for ABCC5
tcacccctttacatttcct

SEQ ID NO: 982 - DNA, 19 bp, Artificial Sequence
  Detection primer for NRG2
ttgggaggggaaatagagt

SEQ ID NO: 983 - DNA, 22 bp, Artificial Sequence
  Detection primer for NRG2
cctaccctaactaaaccacctc

SEQ ID NO: 984 - DNA, 19 bp, Artificial Sequence
  Detection primer for ABCC3
cctaccctccctacacaac

SEQ ID NO: 985 - DNA, 23 bp, Artificial Sequence
  Detection primer for ABCC3
ggatttgggatttagtagtgatt

SEQ ID NO: 986 - DNA, 21 bp, Artificial Sequence
  Detection primer for ADAM17(TACE)
cctaaaccaactcccctaaat

SEQ ID NO: 987 - DNA, 18 bp, Artificial Sequence
  Detection primer for ADAM17(TACE)
ggagggaaaagaggattg

SEQ ID NO: 988 - DNA, 19 bp, Artificial Sequence
  Detection primer for ADAM12
aatttggtgaagggttggt

SEQ ID NO: 989 - DNA, 22 bp, Artificial Sequence
  Detection primer for ADAM12
tcctcaccctcttaaataacat

SEQ ID NO: 990 - DNA, 23 bp, Artificial Sequence
  Detection primer for MAP2K2
agttaaggtggatagttagagag

SEQ ID NO: 991 - DNA, 18 bp, Artificial Sequence
  Detection primer for MAP2K2
tacccaaacccctacctt

SEQ ID NO: 992 - DNA, 23 bp, Artificial Sequence
  Detection primer for PIK3R3
ggattttgttaagtgtttgagaa

SEQ ID NO: 993 - DNA, 19 bp, Artificial Sequence
  Detection primer for PIK3R3
caatcaccacccaccttac

SEQ ID NO: 994 - DNA, 19 bp, Artificial Sequence
  Detection primer for PAK6
gaggttgggtgagaaaagt

SEQ ID NO: 995 - DNA, 19 bp, Artificial Sequence
  Detection primer for PAK6
ctaaacaccttaacacccc

SEQ ID NO: 996 - DNA, 23 bp, Artificial Sequence
  Detection primer for GSK3A
ttggggaatagtttagatttgat

SEQ ID NO: 997 - DNA, 20 bp, Artificial Sequence
  Detection primer for GSK3A
tccattttccaacaatcctt

SEQ ID NO: 998 - DNA, 21 bp, Artificial Sequence
  Detection primer for FOSB
aactaccaacaccatcaaaaa

SEQ ID NO: 999 - DNA, 21 bp, Artificial Sequence
  Detection primer for FOSB
atgtttaggtgaaagtggagg

SEQ ID NO: 1000 - DNA, 23 bp, Artificial Sequence
  Detection primer for PAK4
ccattatcactccataacatctc

SEQ ID NO: 1001 - DNA, 22 bp, Artificial Sequence
  Detection primer for PAK4
tgagggttttatttttggtatt

SEQ ID NO: 1002 - DNA, 20 bp, Artificial Sequence
  Detection primer for ABCC12
cctaaccctcccttctatcc

SEQ ID NO: 1003 - DNA, 20 bp, Artificial Sequence
  Detection primer for ABCC12
tggtgggtgaaggattttat

SEQ ID NO: 1004 - DNA, 18 bp, Artificial Sequence
  Detection primer for ABCA2
ggttggggtagaagggag

SEQ ID NO: 1005 - DNA, 23 bp, Artificial Sequence
  Detection primer for ABCA2
aaaaacaccttaccaaaatacaa

SEQ ID NO: 1006 - DNA, 25 bp, Artificial Sequence
  Detection primer for ABCA2
aactaaaaactatccctaccttacc

SEQ ID NO: 1007 - DNA, 20 bp, Artificial Sequence
  Detection primer for ABCA2
tagagttgtggtgttgggtt

SEQ ID NO: 1008 - DNA, 24 bp, Artificial Sequence
  Detection primer for NRG4
tgtgtatagaggttaggtattggt

SEQ ID NO: 1009 - DNA, 20 bp, Artificial Sequence
  Detection primer for NRG4
tcttttctcccaaacttaca

SEQ ID NO: 1010 - DNA, 22 bp, Artificial Sequence
  Detection primer for PIK3R1
tctcaaaactaaaaaccatcaa

SEQ ID NO: 1011 - DNA, 18 bp, Artificial Sequence
  Detection primer for PIK3R1
gtgaaggaggggtgaaag

SEQ ID NO: 1012 - DNA, 21 bp, Artificial Sequence
  Detection primer for PIK3R1
ttaaatcccctcacaataacc

SEQ ID NO: 1013 - DNA, 19 bp, Artificial Sequence
  Detection primer for PIK3R1
gggaggaaaggagtttagg

SEQ ID NO: 1014 - DNA, 19 bp, Artificial Sequence
  Detection primer for PAK7
atacccacccaaacaatcc

SEQ ID NO: 1015 - DNA, 23 bp, Artificial Sequence
  Detection primer for PAK7
ggagagtagaaagttgtggtttt

SEQ ID NO: 1016 - DNA, 22 bp, Artificial Sequence
  Detection primer for MAP3K1
tgggataatagagaaggaatgt

SEQ ID NO: 1017 - DNA, 22 bp, Artificial Sequence
  Detection primer for MAP3K1
attcccactaccctttacaata

SEQ ID NO: 1018 - DNA, 23 bp, Artificial Sequence
  Detection primer for NRG3
aactcaacctcatacttctcaaa

SEQ ID NO: 1019 - DNA, 21 bp, Artificial Sequence
  Detection primer for NRG3
aagaaggggttttggtttatt

SEQ ID NO: 1020 - DNA, 21 bp, Artificial Sequence
  Detection primer for NRG3
tttagtagagggttagggagg

SEQ ID NO: 1021 - DNA, 22 bp, Artificial Sequence
  Detection primer for NRG3
ctaattcctacccaaatcaaaa

SEQ ID NO: 1022 - DNA, 24 bp, Artificial Sequence
  Detection primer for RASSF1
tttgtttgtgatagaaattaaggg

SEQ ID NO: 1023 - DNA, 19 bp, Artificial Sequence
  Detection primer for RASSF1
aaccccaccctcctaacta

SEQ ID NO: 1024 - DNA, 24 bp, Artificial Sequence
  Detection primer for RARB
ctcaactcctacaatacatttacc

SEQ ID NO: 1025 - DNA, 19 bp, Artificial Sequence
  Detection primer for RARB
gttatggaggggaggtagg

SEQ ID NO: 1026 - DNA, 16 bp, Artificial Sequence
  Detection oligonucleotide for ADAM9
gaggcgatcgagtgtt

SEQ ID NO: 1027 - DNA, 16 bp, Artificial Sequence
  Detection oligonucleotide for ADAM9
gaggtgattgagtgtt

SEQ ID NO: 1028 - DNA, 16 bp, Artificial Sequence
  Detection oligonucleotide for ADAM9
aatcggtcgagatggg

SEQ ID NO: 1029 - DNA, 16 bp, Artificial Sequence
  Detection oligonucleotide for ADAM9
aattggttgagatggg

SEQ ID NO: 1030 - DNA, 16 bp, Artificial Sequence
  Detection oligonucleotide for ADAM9
ggcgttcggagtgaat

SEQ ID NO: 1031 - DNA, 16 bp, Artificial Sequence
  Detection oligonucleotide for ADAM9
ggtgtttggagtgaat

SEQ ID NO: 1032 - DNA, 17 bp, Artificial Sequence
  Detection oligonucleotide for RASGRF1
tattattgagtggtggt

SEQ ID NO: 1033 - DNA, 17 bp, Artificial Sequence
  Detection oligonucleotide for RASGRF1
ttttgttgtagttgagg

SEQ ID NO: 1034 - DNA, 17 bp, Artificial Sequence
  Detection oligonucleotide for RASGRF1
tttgagtgttgttagtt

SEQ ID NO: 1035 - DNA, 16 bp, Artificial Sequence
  Detection oligonucleotide for AKT3
ttacgattcgttcgta

SEQ ID NO: 1036 - DNA, 19 bp, Artificial Sequence
  Detection oligonucleotide for AKT3
tgaattatgatttgtttgt

SEQ ID NO: 1037 - DNA, 16 bp, Artificial Sequence
  Detection oligonucleotide for AKT3
gtttgtagcgagcggt

SEQ ID NO: 1038 - DNA, 16 bp, Artificial Sequence
  Detection oligonucleotide for AKT3
gtttgtagtgagtggt

SEQ ID NO: 1039 - DNA, 17 bp, Artificial Sequence
  Detection oligonucleotide for AKT3
tatcgtgtgtggacgaa

SEQ ID NO: 1040 - DNA, 17 bp, Artificial Sequence
  Detection oligonucleotide for AKT3
tattgtgtgtggatgaa

SEQ ID NO: 1041 - DNA, 16 bp, Artificial Sequence
  Detection oligonucleotide for NRG1
tagtttcggtcgtatt

SEQ ID NO: 1042 - DNA, 18 bp, Artificial Sequence
  Detection oligonucleotide for NRG1
atagtagttttggttgta

SEQ ID NO: 1043 - DNA, 16 bp, Artificial Sequence
  Detection oligonucleotide for NRG1
agtttcgggagcgttt

SEQ ID NO: 1044 - DNA, 17 bp, Artificial Sequence
  Detection oligonucleotide for NRG1
tagagttttgggagtgt

SEQ ID NO: 1045 - DNA, 16 bp, Artificial Sequence
  Detection oligonucleotide for NRG1
agcgttttagcggttg

SEQ ID NO: 1046 - DNA, 17 bp, Artificial Sequence
  Detection oligonucleotide for NRG1
tagtgttttagtggttg

SEQ ID NO: 1047 - DNA, 16 bp, Artificial Sequence
  Detection oligonucleotide for MVP
taaacgcgtagtaaga

SEQ ID NO: 1048 - DNA, 19 bp, Artificial Sequence
  Detection oligonucleotide for MVP
tttaaatgtgtagtaagaa

SEQ ID NO: 1049 - DNA, 17 bp, Artificial Sequence
  Detection oligonucleotide for MVP
atttgtattgtttggga

SEQ ID NO: 1050 - DNA, 16 bp, Artificial Sequence
  Detection oligonucleotide for MVP
aatgcgaatgtcgggt

SEQ ID NO: 1051 - DNA, 16 bp, Artificial Sequence
  Detection oligonucleotide for MVP
aatgtgaatgttgggt

SEQ ID NO: 1052 - DNA, 16 bp, Artificial Sequence
  Detection oligonucleotide for ABCC1
tttaggcgttttcgga

SEQ ID NO: 1053 - DNA, 16 bp, Artificial Sequence
  Detection oligonucleotide for ABCC1
aggtgtttttggaagg

SEQ ID NO: 1054 - DNA, 16 bp, Artificial Sequence
  Detection oligonucleotide for ABCC1
aggcgagttaacgttt

SEQ ID NO: 1055 - DNA, 17 bp, Artificial Sequence
  Detection oligonucleotide for ABCC1
gaaggtgagttaatgtt

SEQ ID NO: 1056 - DNA, 16 bp, Artificial Sequence
  Detection oligonucleotide for ABCC1
ttaggttcgttcgcga

SEQ ID NO: 1057 - DNA, 17 bp, Artificial Sequence
  Detection oligonucleotide for ABCC1
ttaggtttgtttgtgag

SEQ ID NO: 1058 - DNA, 17 bp, Artificial Sequence
  Detection oligonucleotide for ABCC1
ggtttcgtttacgttat

SEQ ID NO: 1059 - DNA, 18 bp, Artificial Sequence
  Detection oligonucleotide for ABCC1
gggttttgtttatgttat

SEQ ID NO: 1060 - DNA, 16 bp, Artificial Sequence
  Detection oligonucleotide for ABCC1
tttggtgacggatatt

SEQ ID NO: 1061 - DNA, 17 bp, Artificial Sequence
  Detection oligonucleotide for ABCC1
tttggtgatggatattg

SEQ ID NO: 1062 - DNA, 16 bp, Artificial Sequence
  Detection oligonucleotide for ABCC5
aggttatacgtcgttt

SEQ ID NO: 1063 - DNA, 18 bp, Artificial Sequence
  Detection oligonucleotide for ABCC5
gaggttatatgttgtttt

SEQ ID NO: 1064 - DNA, 16 bp, Artificial Sequence
  Detection oligonucleotide for ABCC5
ttttcgaattgttcgt

SEQ ID NO: 1065 - DNA, 18 bp, Artificial Sequence
  Detection oligonucleotide for ABCC5
ttttgaattgtttgtagt

SEQ ID NO: 1066 - DNA, 16 bp, Artificial Sequence
  Detection oligonucleotide for ABCC5
tacgtttcgaggaaat

SEQ ID NO: 1067 - DNA, 18 bp, Artificial Sequence
  Detection oligonucleotide for ABCC5
tatgttttgaggaaatgt

SEQ ID NO: 1068 - DNA, 18 bp, Artificial Sequence
  Detection oligonucleotide for NRG2
ttcgttggaaaatcggaa

SEQ ID NO: 1069 - DNA, 18 bp, Artificial Sequence
  Detection oligonucleotide for NRG2
tttgttggaaaattggaa

SEQ ID NO: 1070 - DNA, 16 bp, Artificial Sequence
  Detection oligonucleotide for NRG2
agcgtaacgttagcgt

SEQ ID NO: 1071 - DNA, 18 bp, Artificial Sequence
  Detection oligonucleotide for NRG2
atagtgtaatgttagtgt

SEQ ID NO: 1072 - DNA, 16 bp, Artificial Sequence
  Detection oligonucleotide for NRG2
tttatcggtagttcgg

SEQ ID NO: 1073 - DNA, 16 bp, Artificial Sequence
  Detection oligonucleotide for NRG2
tattggtagtttgggg

SEQ ID NO: 1074 - DNA, 18 bp, Artificial Sequence
  Detection oligonucleotide for ABCC3
tttcgaagattgtacgtt

SEQ ID NO: 1075 - DNA, 19 bp, Artificial Sequence
  Detection oligonucleotide for ABCC3
atttttgaagattgtatgt

SEQ ID NO: 1076 - DNA, 16 bp, Artificial Sequence
  Detection oligonucleotide for ABCC3
gacgatggcgtagatt

SEQ ID NO: 1077 - DNA, 16 bp, Artificial Sequence
  Detection oligonucleotide for ABCC3
gggatgatggtgtaga

SEQ ID NO: 1078 - DNA, 17 bp, Artificial Sequence
  Detection oligonucleotide for ADAM17(TACE)
ttttggatgatttgggt

SEQ ID NO: 1079 - DNA, 17 bp, Artificial Sequence
  Detection oligonucleotide for ADAM17(TACE)
gttggtgttgtgatttt

SEQ ID NO: 1080 - DNA, 17 bp, Artificial Sequence
  Detection oligonucleotide for ADAM17(TACE)
tttttcgaaatttcgtt

SEQ ID NO: 1081 - DNA, 19 bp, Artificial Sequence
  Detection oligonucleotide for ADAM17(TACE)
tttttgaaattttgttagg

SEQ ID NO: 1082 - DNA, 16 bp, Artificial Sequence
  Detection oligonucleotide for ADAM12
agaggattcgatacgt

SEQ ID NO: 1083 - DNA, 19 bp, Artificial Sequence
  Detection oligonucleotide for ADAM12
taagaggatttgatatgta

SEQ ID NO: 1084 - DNA, 16 bp, Artificial Sequence
  Detection oligonucleotide for ADAM12
atacgtatcgtttcga

SEQ ID NO: 1085 - DNA, 18 bp, Artificial Sequence
  Detection oligonucleotide for ADAM12
tatgtattgttttgagtg

SEQ ID NO: 1086 - DNA, 16 bp, Artificial Sequence
  Detection oligonucleotide for ADAM12
ttcgagtgatacgtgt

SEQ ID NO: 1087 - DNA, 18 bp, Artificial Sequence
  Detection oligonucleotide for ADAM12
tttgagtgatatgtgtaa

SEQ ID NO: 1088 - DNA, 16 bp, Artificial Sequence
  Detection oligonucleotide for MAP2K2
tggcgtaagttacggg

SEQ ID NO: 1089 - DNA, 16 bp, Artificial Sequence
  Detection oligonucleotide for MAP2K2
tggtgtaagttatggg

SEQ ID NO: 1090 - DNA, 16 bp, Artificial Sequence
  Detection oligonucleotide for MAP2K2
ttagaatcgaggcgat

SEQ ID NO: 1091 - DNA, 16 bp, Artificial Sequence
  Detection oligonucleotide for MAP2K2
agaattgaggtgatgg

SEQ ID NO: 1092 - DNA, 16 bp, Artificial Sequence
  Detection oligonucleotide for MAP2K2
aatgaaggcgtggatt

SEQ ID NO: 1093 - DNA, 16 bp, Artificial Sequence
  Detection oligonucleotide for MAP2K2
aatgaaggtgtggatt

SEQ ID NO: 1094 - DNA, 18 bp, Artificial Sequence
  Detection oligonucleotide for MAP2K2
ttcgattattgttcgttt

SEQ ID NO: 1095 - DNA, 18 bp, Artificial Sequence
  Detection oligonucleotide for MAP2K2
agtttgattattgtttgt

SEQ ID NO: 1096 - DNA, 16 bp, Artificial Sequence
  Detection oligonucleotide for PIK3R3
agttattcgcgttttt

SEQ ID NO: 1097 - DNA, 20 bp, Artificial Sequence
  Detection oligonucleotide for PIK3R3
aattagttatttgtgttttt

SEQ ID NO: 1098 - DNA, 16 bp, Artificial Sequence
  Detection oligonucleotide for PIK3R3
aatggtacgattcggg

SEQ ID NO: 1099 - DNA, 17 bp, Artificial Sequence
  Detection oligonucleotide for PIK3R3
agaatggtatgatttgg

SEQ ID NO: 1100 - DNA, 18 bp, Artificial Sequence
  Detection oligonucleotide for PIK3R3
ggcgttggtcgtatttta

SEQ ID NO: 1101 - DNA, 18 bp, Artificial Sequence
  Detection oligonucleotide for PIK3R3
ggtgttggttgtatttta

SEQ ID NO: 1102 - DNA, 16 bp, Artificial Sequence
  Detection oligonucleotide for PIK3R3
gggagtacgcgagtta

SEQ ID NO: 1103 - DNA, 17 bp, Artificial Sequence
  Detection oligonucleotide for PIK3R3
gggagtatgtgagttag

SEQ ID NO: 1104 - DNA, 17 bp, Artificial Sequence
  Detection oligonucleotide for PAK6
agaacgtaggatttcgt

SEQ ID NO: 1105 - DNA, 18 bp, Artificial Sequence
  Detection oligonucleotide for PAK6
agaatgtaggattttgtt

SEQ ID NO: 1106 - DNA, 16 bp, Artificial Sequence
  Detection oligonucleotide for PAK6
gtagttacggtaaggt

SEQ ID NO: 1107 - DNA, 18 bp, Artificial Sequence
  Detection oligonucleotide for PAK6
tagttatggtaaggtttt

SEQ ID NO: 1108 - DNA, 16 bp, Artificial Sequence
  Detection oligonucleotide for GSK3A
tttgtcgggaagcgaa

SEQ ID NO: 1109 - DNA, 16 bp, Artificial Sequence
  Detection oligonucleotide for GSK3A
tttgttgggaagtgaa

SEQ ID NO: 1110 - DNA, 16 bp, Artificial Sequence
  Detection oligonucleotide for GSK3A
agtcgaggtcgattaa

SEQ ID NO: 1111 - DNA, 17 bp, Artificial Sequence
  Detection oligonucleotide for GSK3A
agagttgaggttgatta

SEQ ID NO: 1112 - DNA, 16 bp, Artificial Sequence
  Detection oligonucleotide for FOSB
tataggttcggcgttt

SEQ ID NO: 1113 - DNA, 17 bp, Artificial Sequence
  Detection oligonucleotide for FOSB
tataggtttggtgtttg

SEQ ID NO: 1114 - DNA, 16 bp, Artificial Sequence
  Detection oligonucleotide for FOSB
attcgttgtgcgagtt

SEQ ID NO: 1115 - DNA, 17 bp, Artificial Sequence
  Detection oligonucleotide for FOSB
tttgttgtgtgagttta

SEQ ID NO: 1116 - DNA, 16 bp, Artificial Sequence
  Detection oligonucleotide for FOSB
atttcgaggttcgttt

SEQ ID NO: 1117 - DNA, 17 bp, Artificial Sequence
  Detection oligonucleotide for FOSB
ggattttgaggtttgtt

SEQ ID NO: 1118 - DNA, 16 bp, Artificial Sequence
  Detection oligonucleotide for PAK4
attcgatacgtaggga

SEQ ID NO: 1119 - DNA, 18 bp, Artificial Sequence
  Detection oligonucleotide for PAK4
tttgatatgtagggatag

SEQ ID NO: 1120 - DNA, 16 bp, Artificial Sequence
  Detection oligonucleotide for PAK4
taggacgtgtattcga

SEQ ID NO: 1121 - DNA, 18 bp, Artificial Sequence
  Detection oligonucleotide for PAK4
ataggatgtgtatttgat

SEQ ID NO: 1122 - DNA, 16 bp, Artificial Sequence
  Detection oligonucleotide for PAK4
tttcgtacgatggttt

SEQ ID NO: 1123 - DNA, 17 bp, Artificial Sequence
  Detection oligonucleotide for PAK4
tgttttgtatgatggtt

SEQ ID NO: 1124 - DNA, 17 bp, Artificial Sequence
  Detection oligonucleotide for ABCA2
tgcgttaggaaacgtta

SEQ ID NO: 1125 - DNA, 17 bp, Artificial Sequence
  Detection oligonucleotide for ABCA2
ttgtgttaggaaatgtt

SEQ ID NO: 1126 - DNA, 17 bp, Artificial Sequence
  Detection oligonucleotide for ABCA2
tggcgttttttgacgta

SEQ ID NO: 1127 - DNA, 17 bp, Artificial Sequence
  Detection oligonucleotide for ABCA2
tggtgttttttgatgta

SEQ ID NO: 1128 - DNA, 16 bp, Artificial Sequence
  Detection oligonucleotide for ABCA2
ttcgggcgggtttata

SEQ ID NO: 1129 - DNA, 17 bp, Artificial Sequence
  Detection oligonucleotide for ABCA2
ttttgggtgggtttata

SEQ ID NO: 1130 - DNA, 16 bp, Artificial Sequence
  Detection oligonucleotide for ABCA2
attcgttcgaggtaag

SEQ ID NO: 1131 - DNA, 16 bp, Artificial Sequence
  Detection oligonucleotide for ABCA2
tggatttgtttgaggt

SEQ ID NO: 1132 - DNA, 18 bp, Artificial Sequence
  Detection oligonucleotide for NRG4
tgtttacgttttaaaggt

SEQ ID NO: 1133 - DNA, 19 bp, Artificial Sequence
  Detection oligonucleotide for NRG4
attgtttatgttttaaagg

SEQ ID NO: 1134 - DNA, 18 bp, Artificial Sequence
  Detection oligonucleotide for NRG4
taatttaagacgtagtgt

SEQ ID NO: 1135 - DNA, 19 bp, Artificial Sequence
  Detection oligonucleotide for NRG4
atttaagatgtagtgtaag

SEQ ID NO: 1136 - DNA, 16 bp, Artificial Sequence
  Detection oligonucleotide for NRG4
tggttacgggagttat

SEQ ID NO: 1137 - DNA, 17 bp, Artificial Sequence
  Detection oligonucleotide for NRG4
attggttatgggagtta

SEQ ID NO: 1138 - DNA, 18 bp, Artificial Sequence
  Detection oligonucleotide for NRG4
aatttacgtgtttagagt

SEQ ID NO: 1139 - DNA, 20 bp, Artificial Sequence
  Detection oligonucleotide for NRG4
ttttaatttatgtgtttaga

SEQ ID NO: 1140 - DNA, 16 bp, Artificial Sequence
  Detection oligonucleotide for PIK3R1
tgaatcggagggacgg

SEQ ID NO: 1141 - DNA, 16 bp, Artificial Sequence
  Detection oligonucleotide for PIK3R1
tgaattggagggatgg

SEQ ID NO: 1142 - DNA, 18 bp, Artificial Sequence
  Detection oligonucleotide for PIK3R1
agataaagatcgtagttt

SEQ ID NO: 1143 - DNA, 19 bp, Artificial Sequence
  Detection oligonucleotide for PIK3R1
agataaagattgtagtttt

SEQ ID NO: 1144 - DNA, 16 bp, Artificial Sequence
  Detection oligonucleotide for PIK3R1
ttaggcgttcgtacgt

SEQ ID NO: 1145 - DNA, 17 bp, Artificial Sequence
  Detection oligonucleotide for PIK3R1
aggtgtttgtatgtttt

SEQ ID NO: 1146 - DNA, 16 bp, Artificial Sequence
  Detection oligonucleotide for PIK3R1
tttgagggcgtacgtt

SEQ ID NO: 1147 - DNA, 16 bp, Artificial Sequence
  Detection oligonucleotide for PIK3R1
tttgagggtgtatgtt

SEQ ID NO: 1148 - DNA, 17 bp, Artificial Sequence
  Detection oligonucleotide for PIK3R1
ttattttcgtttgggaa

SEQ ID NO: 1149 - DNA, 18 bp, Artificial Sequence
  Detection oligonucleotide for PIK3R1
tatttttgtttgggaaat

SEQ ID NO: 1150 - DNA, 16 bp, Artificial Sequence
  Detection oligonucleotide for PIK3R1
gattcgcgagaaggga

SEQ ID NO: 1151 - DNA, 16 bp, Artificial Sequence
  Detection oligonucleotide for PIK3R1
gatttgtgagaaggga

SEQ ID NO: 1152 - DNA, 17 bp, Artificial Sequence
  Detection oligonucleotide for PIK3R1
tgttatcggttgataag

SEQ ID NO: 1153 - DNA, 18 bp, Artificial Sequence
  Detection oligonucleotide for PIK3R1
agttgttattggttgata

SEQ ID NO: 1154 - DNA, 16 bp, Artificial Sequence
  Detection oligonucleotide for PIK3R1
atcgtcgttttcggga

SEQ ID NO: 1155 - DNA, 17 bp, Artificial Sequence
  Detection oligonucleotide for PIK3R1
tattgttgtttttggga

SEQ ID NO: 1156 - DNA, 18 bp, Artificial Sequence
  Detection oligonucleotide for PAK7
tagtgtgtgtttggggag

SEQ ID NO: 1157 - DNA, 17 bp, Artificial Sequence
  Detection oligonucleotide for PAK7
taggtaggtgtgtttgt

SEQ ID NO: 1158 - DNA, 17 bp, Artificial Sequence
  Detection oligonucleotide for PAK7
ttgaggtattgttgttt

SEQ ID NO: 1159 - DNA, 16 bp, Artificial Sequence
  Detection oligonucleotide for AKT1
atagttttcgggagag

SEQ ID NO: 1160 - DNA, 16 bp, Artificial Sequence
  Detection oligonucleotide for AKT1
tagtttttgggagagg

SEQ ID NO: 1161 - DNA, 17 bp, Artificial Sequence
  Detection oligonucleotide for AKT1
agaggtaatcggatttt

SEQ ID NO: 1162 - DNA, 18 bp, Artificial Sequence
  Detection oligonucleotide for AKT1
agaggtaattggattttt

SEQ ID NO: 1163 - DNA, 17 bp, Artificial Sequence
  Detection oligonucleotide for AKT1
ttattaacggatttcgt

SEQ ID NO: 1164 - DNA, 20 bp, Artificial Sequence
  Detection oligonucleotide for AKT1
tttttattaatggattttgt

SEQ ID NO: 1165 - DNA, 16 bp, Artificial Sequence
  Detection oligonucleotide for AKT1
tttttcgttcggatga

SEQ ID NO: 1166 - DNA, 16 bp, Artificial Sequence
  Detection oligonucleotide for AKT1
tttgtttggatgaggg

SEQ ID NO: 1167 - DNA, 17 bp, Artificial Sequence
  Detection oligonucleotide for AKT2
agtttgtttgtagatgt

SEQ ID NO: 1168 - DNA, 17 bp, Artificial Sequence
  Detection oligonucleotide for AKT2
taagttgggttggttaa

SEQ ID NO: 1169 - DNA, 17 bp, Artificial Sequence
  Detection oligonucleotide for BCL2
tttagggatgttttgag

SEQ ID NO: 1170 - DNA, 18 bp, Artificial Sequence
  Detection oligonucleotide for BCL2
aggtgtttgtgtattata

SEQ ID NO: 1171 - DNA, 16 bp, Artificial Sequence
  Detection oligonucleotide for BRAF
attagcgatagagcgt

SEQ ID NO: 1172 - DNA, 17 bp, Artificial Sequence
  Detection oligonucleotide for BRAF
tagtgatagagtgttga

SEQ ID NO: 1173 - DNA, 16 bp, Artificial Sequence
  Detection oligonucleotide for BRAF
tatcggaaattgcgat

SEQ ID NO: 1174 - DNA, 17 bp, Artificial Sequence
  Detection oligonucleotide for BRAF
ggtattggaaattgtga

SEQ ID NO: 1175 - DNA, 16 bp, Artificial Sequence
  Detection oligonucleotide for BRAF
tattgtcgcgtgtaat

SEQ ID NO: 1176 - DNA, 18 bp, Artificial Sequence
  Detection oligonucleotide for BRAF
agttattgttgtgtgtaa

SEQ ID NO: 1177 - DNA, 16 bp, Artificial Sequence
  Detection oligonucleotide for BRAF
tttcgacgtggaggat

SEQ ID NO: 1178 - DNA, 16 bp, Artificial Sequence
  Detection oligonucleotide for BRAF
ttttgatgtggaggat

SEQ ID NO: 1179 - DNA, 18 bp, Artificial Sequence
  Detection oligonucleotide for CBL
gacgttttttagtcgtat

SEQ ID NO: 1180 - DNA, 18 bp, Artificial Sequence
  Detection oligonucleotide for CBL
ggatgttttttagttgta

SEQ ID NO: 1181 - DNA, 16 bp, Artificial Sequence
  Detection oligonucleotide for CBL
tattcgtcggggacgg

SEQ ID NO: 1182 - DNA, 16 bp, Artificial Sequence
  Detection oligonucleotide for CBL
tatttgttggggatgg

SEQ ID NO: 1183 - DNA, 18 bp, Artificial Sequence
  Detection oligonucleotide for CDKN1B(p27Kip)
ttgcgtcggtattttgta

SEQ ID NO: 1184 - DNA, 18 bp, Artificial Sequence
  Detection oligonucleotide for CDKN1B(p27Kip)
ttgtgttggtattttgta

SEQ ID NO: 1185 - DNA, 17 bp, Artificial Sequence
  Detection oligonucleotide for CDKN1B(p27Kip)
ggcggttttcgttgata

SEQ ID NO: 1186 - DNA, 17 bp, Artificial Sequence
  Detection oligonucleotide for CDKN1B(p27Kip)
ggtggtttttgttgata

SEQ ID NO: 1187 - DNA, 16 bp, Artificial Sequence
  Detection oligonucleotide for CDKN1B(p27Kip)
tattatcgtcggttgt

SEQ ID NO: 1188 - DNA, 17 bp, Artificial Sequence
  Detection oligonucleotide for CDKN1B(p27Kip)
tattgttggttgtaggt

SEQ ID NO: 1189 - DNA, 18 bp, Artificial Sequence
  Detection oligonucleotide for CDKN2A
gaaagatattgtggtttt

SEQ ID NO: 1190 - DNA, 18 bp, Artificial Sequence
  Detection oligonucleotide for CDKN2A
tttgttagtattggagga

SEQ ID NO: 1191 - DNA, 16 bp, Artificial Sequence
  Detection oligonucleotide for COT(MAP3K8)
tgatcgcgtttgaatt

SEQ ID NO: 1192 - DNA, 17 bp, Artificial Sequence
  Detection oligonucleotide for COT(MAP3K8)
tgtgattgtgtttgaat

SEQ ID NO: 1193 - DNA, 16 bp, Artificial Sequence
  Detection oligonucleotide for COT(MAP3K8)
ttcgcgttttagtcga

SEQ ID NO: 1194 - DNA, 18 bp, Artificial Sequence
  Detection oligonucleotide for COT(MAP3K8)
tttgtgttttagttgaat

SEQ ID NO: 1195 - DNA, 16 bp, Artificial Sequence
  Detection oligonucleotide for DAPK1
tatttattcgggcgtt

SEQ ID NO: 1196 - DNA, 17 bp, Artificial Sequence
  Detection oligonucleotide for DAPK1
tatttgggtgtttggga

SEQ ID NO: 1197 - DNA, 16 bp, Artificial Sequence
  Detection oligonucleotide for DAPK1
gagtcgcgtttggtta

SEQ ID NO: 1198 - DNA, 17 bp, Artificial Sequence
  Detection oligonucleotide for DAPK1
gagttgtgtttggttat

SEQ ID NO: 1199 - DNA, 16 bp, Artificial Sequence
  Detection oligonucleotide for DAPK1
agattagtcggggcgg

SEQ ID NO: 1200 - DNA, 16 bp, Artificial Sequence
  Detection oligonucleotide for DAPK1
agattagttggggtgg

SEQ ID NO: 1201 - DNA, 16 bp, Artificial Sequence
  Detection oligonucleotide for DAPK1
ttataggcgttagcgt

SEQ ID NO: 1202 - DNA, 18 bp, Artificial Sequence
  Detection oligonucleotide for DAPK1
gattataggtgttagtgt

SEQ ID NO: 1203 - DNA, 16 bp, Artificial Sequence
  Detection oligonucleotide for EGFR
aacgaaacgtttcgtt

SEQ ID NO: 1204 - DNA, 18 bp, Artificial Sequence
  Detection oligonucleotide for EGFR
agaatgaaatgttttgtt

SEQ ID NO: 1205 - DNA, 16 bp, Artificial Sequence
  Detection oligonucleotide for EGFR
ttttttcggtcgaaga

SEQ ID NO: 1206 - DNA, 18 bp, Artificial Sequence
  Detection oligonucleotide for EGFR
atttttttggttgaagaa

SEQ ID NO: 1207 - DNA, 17 bp, Artificial Sequence
  Detection oligonucleotide for EGFR
ttcggtgttttacgcgt

SEQ ID NO: 1208 - DNA, 17 bp, Artificial Sequence
  Detection oligonucleotide for EGFR
tttggtgttttatgtgt

SEQ ID NO: 1209 - DNA, 16 bp, Artificial Sequence
  Detection oligonucleotide for ELK1
ggcgttacggattgat

SEQ ID NO: 1210 - DNA, 17 bp, Artificial Sequence
  Detection oligonucleotide for ELK1
ggtgttatggattgatt

SEQ ID NO: 1211 - DNA, 16 bp, Artificial Sequence
  Detection oligonucleotide for ELK1
tgattcgttacgatgt

SEQ ID NO: 1212 - DNA, 18 bp, Artificial Sequence
  Detection oligonucleotide for ELK1
ggattgatttgttatgat

SEQ ID NO: 1213 - DNA, 16 bp, Artificial Sequence
  Detection oligonucleotide for ELK1
ttacggacgggttttt

SEQ ID NO: 1214 - DNA, 16 bp, Artificial Sequence
  Detection oligonucleotide for ELK1
aaggttatggatgggt

SEQ ID NO: 1215 - DNA, 16 bp, Artificial Sequence
  Detection oligonucleotide for ERBB2
aatttaggcgtttcgg

SEQ ID NO: 1216 - DNA, 18 bp, Artificial Sequence
  Detection oligonucleotide for ERBB2
gtaatttaggtgttttgg

SEQ ID NO: 1217 - DNA, 16 bp, Artificial Sequence
  Detection oligonucleotide for ERBB2
tttcggcgttaggagg

SEQ ID NO: 1218 - DNA, 16 bp, Artificial Sequence
  Detection oligonucleotide for ERBB2
ttttggtgttaggagg

SEQ ID NO: 1219 - DNA, 16 bp, Artificial Sequence
  Detection oligonucleotide for ERBB2
taggtttgcgcgaaga

SEQ ID NO: 1220 - DNA, 16 bp, Artificial Sequence
  Detection oligonucleotide for ERBB2
tttgtgtgaagagagg

SEQ ID NO: 1221 - DNA, 16 bp, Artificial Sequence
  Detection oligonucleotide for ERBB3
tgtttcgagcgtgtta

SEQ ID NO: 1222 - DNA, 17 bp, Artificial Sequence
  Detection oligonucleotide for ERBB3
ttgttttgagtgtgtta

SEQ ID NO: 1223 - DNA, 16 bp, Artificial Sequence
  Detection oligonucleotide for ERBB3
gagtttcggatcgttt

SEQ ID NO: 1224 - DNA, 17 bp, Artificial Sequence
  Detection oligonucleotide for ERBB3
agttttggattgtttgt

SEQ ID NO: 1225 - DNA, 16 bp, Artificial Sequence
  Detection oligonucleotide for ERBB3
tttttcgcgcgaggtt

SEQ ID NO: 1226 - DNA, 17 bp, Artificial Sequence
  Detection oligonucleotide for ERBB3
ttttgtgtgaggttgga

SEQ ID NO: 1227 - DNA, 20 bp, Artificial Sequence
  Detection oligonucleotide for ERBB4
gagttaaatatggtaattga

SEQ ID NO: 1228 - DNA, 17 bp, Artificial Sequence
  Detection oligonucleotide for ERBB4
gtaattgatgggaaggt

SEQ ID NO: 1229 - DNA, 17 bp, Artificial Sequence
  Detection oligonucleotide for ERBB4
taggtgagtaagtgttt

SEQ ID NO: 1230 - DNA, 18 bp, Artificial Sequence
  Detection oligonucleotide for FOS
gaagatgtatgtttttgt

SEQ ID NO: 1231 - DNA, 17 bp, Artificial Sequence
  Detection oligonucleotide for FOS
tttttagggtgtgaaga

SEQ ID NO: 1232 - DNA, 17 bp, Artificial Sequence
  Detection oligonucleotide for FOS
tagttttagtgtgttgg

SEQ ID NO: 1233 - DNA, 17 bp, Artificial Sequence
  Detection oligonucleotide for FOS
atagttggggttatgtt

SEQ ID NO: 1234 - DNA, 16 bp, Artificial Sequence
  Detection oligonucleotide for FOSL1
tgtttcggattcggaa

SEQ ID NO: 1235 - DNA, 17 bp, Artificial Sequence
  Detection oligonucleotide for FOSL1
tgttttggatttggaat

SEQ ID NO: 1236 - DNA, 16 bp, Artificial Sequence
  Detection oligonucleotide for FOSL1
agttattcggggcgtt

SEQ ID NO: 1237 - DNA, 16 bp, Artificial Sequence
  Detection oligonucleotide for FOSL1
agttatttggggtgtt

SEQ ID NO: 1238 - DNA, 16 bp, Artificial Sequence
  Detection oligonucleotide for FOSL1
tttcgtcgagttacgg

SEQ ID NO: 1239 - DNA, 17 bp, Artificial Sequence
  Detection oligonucleotide for FOSL1
gttttgttgagttatgg

SEQ ID NO: 1240 - DNA, 16 bp, Artificial Sequence
  Detection oligonucleotide for FOSL1
agtacgtgtcgatagg

SEQ ID NO: 1241 - DNA, 17 bp, Artificial Sequence
  Detection oligonucleotide for FOSL1
tatgtgttgatagggga

SEQ ID NO: 1242 - DNA, 17 bp, Artificial Sequence
  Detection oligonucleotide for FOSL2
agtattcggattttcga

SEQ ID NO: 1243 - DNA, 19 bp, Artificial Sequence
  Detection oligonucleotide for FOSL2
aagtatttggatttttgat

SEQ ID NO: 1244 - DNA, 16 bp, Artificial Sequence
  Detection oligonucleotide for FOSL2
ttttcgatcgttaggt

SEQ ID NO: 1245 - DNA, 17 bp, Artificial Sequence
  Detection oligonucleotide for FOSL2
ttttgattgttaggtgg

SEQ ID NO: 1246 - DNA, 16 bp, Artificial Sequence
  Detection oligonucleotide for FOSL2
gatacgcggttgttat

SEQ ID NO: 1247 - DNA, 18 bp, Artificial Sequence
  Detection oligonucleotide for FOSL2
gatatgtggttgttattg

SEQ ID NO: 1248 - DNA, 17 bp, Artificial Sequence
  Detection oligonucleotide for GSTP1
ttgtgattttggagttt

SEQ ID NO: 1249 - DNA, 16 bp, Artificial Sequence
  Detection oligonucleotide for GSTP1
gtgtgtagtgaattgg

SEQ ID NO: 1250 - DNA, 17 bp, Artificial Sequence
  Detection oligonucleotide for GSTP1
aagaggattgtagtgaa

SEQ ID NO: 1251 - DNA, 17 bp, Artificial Sequence
  Detection oligonucleotide for HRAS
agtttgttcgggtacgt

SEQ ID NO: 1252 - DNA, 17 bp, Artificial Sequence
  Detection oligonucleotide for HRAS
agtttgtttgggtatgt

SEQ ID NO: 1253 - DNA, 16 bp, Artificial Sequence
  Detection oligonucleotide for HRAS
tttcgtcgtggttaga

SEQ ID NO: 1254 - DNA, 17 bp, Artificial Sequence
  Detection oligonucleotide for HRAS
ttttgttgtggttagat

SEQ ID NO: 1255 - DNA, 18 bp, Artificial Sequence
  Detection oligonucleotide for HRAS
tttgtatgttgggttgta

SEQ ID NO: 1256 - DNA, 16 bp, Artificial Sequence
  Detection oligonucleotide for MAP3K1
tagtaggcgacggttt

SEQ ID NO: 1257 - DNA, 17 bp, Artificial Sequence
  Detection oligonucleotide for MAP3K1
tgtagtaggtgatggtt

SEQ ID NO: 1258 - DNA, 16 bp, Artificial Sequence
  Detection oligonucleotide for MAP3K1
ggtttttcgacgttta

SEQ ID NO: 1259 - DNA, 18 bp, Artificial Sequence
  Detection oligonucleotide for MAP3K1
gggttttttgatgtttat

SEQ ID NO: 1260 - DNA, 17 bp, Artificial Sequence
  Detection oligonucleotide for MAP3K1
ttgttgaacgttgattt

SEQ ID NO: 1261 - DNA, 17 bp, Artificial Sequence
  Detection oligonucleotide for MAP3K1
gttgaatgttgatttgt

SEQ ID NO: 1262 - DNA, 17 bp, Artificial Sequence
  Detection oligonucleotide for NRG3
gggtttttttgaaggta

SEQ ID NO: 1263 - DNA, 19 bp, Artificial Sequence
  Detection oligonucleotide for NRG3
tattttttgatggagttta

SEQ ID NO: 1264 - DNA, 18 bp, Artificial Sequence
  Detection oligonucleotide for NRG3
tttgtttgttggtaggaa

SEQ ID NO: 1265 - DNA, 16 bp, Artificial Sequence
  Detection oligonucleotide for NRG3
aggttggtgggtatgt

SEQ ID NO: 1266 - DNA, 16 bp, Artificial Sequence
  Detection oligonucleotide for RASSF1
ttaggattcgcgggga

SEQ ID NO: 1267 - DNA, 16 bp, Artificial Sequence
  Detection oligonucleotide for RASSF1
ttaggatttgtgggga

SEQ ID NO: 1268 - DNA, 16 bp, Artificial Sequence
  Detection oligonucleotide for RASSF1
taggcggtggaatcgg

SEQ ID NO: 1269 - DNA, 16 bp, Artificial Sequence
  Detection oligonucleotide for RASSF1
taggtggtggaattgg

SEQ ID NO: 1270 - DNA, 17 bp, Artificial Sequence
  Detection oligonucleotide for RASSF1
ggttttacgtacggttt

SEQ ID NO: 1271 - DNA, 17 bp, Artificial Sequence
  Detection oligonucleotide for RASSF1
gggttttatgtatggtt

SEQ ID NO: 1272 - DNA, 16 bp, Artificial Sequence
  Detection oligonucleotide for RASSF1
tacggtttcgcgggta

SEQ ID NO: 1273 - DNA, 17 bp, Artificial Sequence
  Detection oligonucleotide for RASSF1
tatggttttgtgggtag

SEQ ID NO: 1274 - DNA, 16 bp, Artificial Sequence
  Detection oligonucleotide for RARB
gatatgcgtggtcgtt

SEQ ID NO: 1275 - DNA, 16 bp, Artificial Sequence
  Detection oligonucleotide for RARB
ggatatgtgtggttgt

SEQ ID NO: 1276 - DNA, 16 bp, Artificial Sequence
  Detection oligonucleotide for RARB
aagagtaacgggtagg

SEQ ID NO: 1277 - DNA, 16 bp, Artificial Sequence
  Detection oligonucleotide for RARB
agagtaatgggtaggg

SEQ ID NO: 1278 - DNA, 17 bp, Artificial Sequence
  Detection oligonucleotide for RARB
agtttttcgatgatagg

SEQ ID NO: 1279 - DNA, 18 bp, Artificial Sequence
  Detection oligonucleotide for RARB
agttttttgatgataggt

SEQ ID NO: 1280 - DNA, 18 bp, Artificial Sequence
  Detection oligonucleotide for RARB
tatgtttcgggttttata

SEQ ID NO: 1281 - DNA, 18 bp, Artificial Sequence
  Detection oligonucleotide for RARB
atgttttgggttttatag

SEQ ID NO: 1282 - DNA, 16 bp, Artificial Sequence
  Detection oligonucleotide for IGF2
aacgtttcgagttttt

SEQ ID NO: 1283 - DNA, 18 bp, Artificial Sequence
  Detection oligonucleotide for IGF2
tttgaatgttttgagttt

SEQ ID NO: 1284 - DNA, 16 bp, Artificial Sequence
  Detection oligonucleotide for IGF2
tttttggcgagtacgt

SEQ ID NO: 1285 - DNA, 17 bp, Artificial Sequence
  Detection oligonucleotide for IGF2
ttttttggtgagtatgt

SEQ ID NO: 1286 - DNA, 16 bp, Artificial Sequence
  Detection oligonucleotide for IGF2
ggcgggtacgtaggag

SEQ ID NO: 1287 - DNA, 16 bp, Artificial Sequence
  Detection oligonucleotide for IGF2
ggtgggtatgtaggag

SEQ ID NO: 1288 - DNA, 16 bp, Artificial Sequence
  Detection oligonucleotide for JUN
gtcgattttcgggaga

SEQ ID NO: 1289 - DNA, 16 bp, Artificial Sequence
  Detection oligonucleotide for JUN
ggttgatttttgggag

SEQ ID NO: 1290 - DNA, 16 bp, Artificial Sequence
  Detection oligonucleotide for JUN
gatcgtcgtttttgaa

SEQ ID NO: 1291 - DNA, 17 bp, Artificial Sequence
  Detection oligonucleotide for JUN
ggattgttgtttttgaa

SEQ ID NO: 1292 - DNA, 16 bp, Artificial Sequence
  Detection oligonucleotide for JUN
ttcggtttttacgagt

SEQ ID NO: 1293 - DNA, 18 bp, Artificial Sequence
  Detection oligonucleotide for JUN
tttttggtttttatgagt

SEQ ID NO: 1294 - DNA, 17 bp, Artificial Sequence
  Detection oligonucleotide for JUN
agcgtttagtttcgggt

SEQ ID NO: 1295 - DNA, 17 bp, Artificial Sequence
  Detection oligonucleotide for JUN
agtgtttagttttgggt

SEQ ID NO: 1296 - DNA, 16 bp, Artificial Sequence
  Detection oligonucleotide for JUNB
tagaatacgagagggg

SEQ ID NO: 1297 - DNA, 16 bp, Artificial Sequence
  Detection oligonucleotide for JUNB
agaatatgagaggggt

SEQ ID NO: 1298 - DNA, 16 bp, Artificial Sequence
  Detection oligonucleotide for JUNB
tttggttacgcgggaa

SEQ ID NO: 1299 - DNA, 16 bp, Artificial Sequence
  Detection oligonucleotide for JUNB
tttggttatgtgggaa

SEQ ID NO: 1300 - DNA, 16 bp, Artificial Sequence
  Detection oligonucleotide for JUNB
aatacgcgtttggtta

SEQ ID NO: 1301 - DNA, 17 bp, Artificial Sequence
  Detection oligonucleotide for JUNB
aggaaatatgtgtttgg

SEQ ID NO: 1302 - DNA, 16 bp, Artificial Sequence
  Detection oligonucleotide for JUND
tggcggtagcgtttaa

SEQ ID NO: 1303 - DNA, 17 bp, Artificial Sequence
  Detection oligonucleotide for JUND
ggtggtagtgtttaagt

SEQ ID NO: 1304 - DNA, 16 bp, Artificial Sequence
  Detection oligonucleotide for JUND
gtatttttcgacggtt

SEQ ID NO: 1305 - DNA, 18 bp, Artificial Sequence
  Detection oligonucleotide for JUND
tattttttgatggtttgt

SEQ ID NO: 1306 - DNA, 16 bp, Artificial Sequence
  Detection oligonucleotide for JUND
tttttagcgcggtatt

SEQ ID NO: 1307 - DNA, 18 bp, Artificial Sequence
  Detection oligonucleotide for JUND
gtttttagtgtggtattt

SEQ ID NO: 1308 - DNA, 16 bp, Artificial Sequence
  Detection oligonucleotide for JUND
gtcgacggcgttttta

SEQ ID NO: 1309 - DNA, 17 bp, Artificial Sequence
  Detection oligonucleotide for JUND
gttgatggtgtttttag

SEQ ID NO: 1310 - DNA, 18 bp, Artificial Sequence
  Detection oligonucleotide for MDR1(ABCB1)
gagtagtgtttaaattgt

SEQ ID NO: 1311 - DNA, 19 bp, Artificial Sequence
  Detection oligonucleotide for MDR1(ABCB1)
ggagattttatgagtaatt

SEQ ID NO: 1312 - DNA, 17 bp, Artificial Sequence
  Detection oligonucleotide for MDR1(ABCB1)
gtatagtttgtgtggtg

SEQ ID NO: 1313 - DNA, 16 bp, Artificial Sequence
  Detection oligonucleotide for MDR1(ABCB1)
tgtttggagtgtgtat

SEQ ID NO: 1314 - DNA, 16 bp, Artificial Sequence
  Detection oligonucleotide for MGMT
tttcgggtttagcgta

SEQ ID NO: 1315 - DNA, 17 bp, Artificial Sequence
  Detection oligonucleotide for MGMT
tttgggtttagtgtagt

SEQ ID NO: 1316 - DNA, 17 bp, Artificial Sequence
  Detection oligonucleotide for MGMT
ttcgagtaggatcggga

SEQ ID NO: 1317 - DNA, 17 bp, Artificial Sequence
  Detection oligonucleotide for MGMT
tttgagtaggattggga

SEQ ID NO: 1318 - DNA, 16 bp, Artificial Sequence
  Detection oligonucleotide for MGMT
ttcgcgcgtttttagg

SEQ ID NO: 1319 - DNA, 18 bp, Artificial Sequence
  Detection oligonucleotide for MGMT
tttgtgtgtttttaggat

SEQ ID NO: 1320 - DNA, 16 bp, Artificial Sequence
  Detection oligonucleotide for MGMT
taggtcgtttgtacgt

SEQ ID NO: 1321 - DNA, 17 bp, Artificial Sequence
  Detection oligonucleotide for MGMT
gtaggttgtttgtatgt

SEQ ID NO: 1322 - DNA, 17 bp, Artificial Sequence
  Detection oligonucleotide for PTEN
taatcgttcgtagagat

SEQ ID NO: 1323 - DNA, 18 bp, Artificial Sequence
  Detection oligonucleotide for PTEN
attgtttgtagagatttg

SEQ ID NO: 1324 - DNA, 16 bp, Artificial Sequence
  Detection oligonucleotide for PTEN
atcgttgtcggattat

SEQ ID NO: 1325 - DNA, 18 bp, Artificial Sequence
  Detection oligonucleotide for PTEN
gtattgttgttggattat

SEQ ID NO: 1326 - DNA, 16 bp, Artificial Sequence
  Detection oligonucleotide for PTEN
tagattttcgcggcgt

SEQ ID NO: 1327 - DNA, 17 bp, Artificial Sequence
  Detection oligonucleotide for PTEN
ttagatttttgtggtgt

SEQ ID NO: 1328 - DNA, 18 bp, Artificial Sequence
  Detection oligonucleotide for RAF1
ttagcgattattagacgt

SEQ ID NO: 1329 - DNA, 18 bp, Artificial Sequence
  Detection oligonucleotide for RAF1
agtgattattagatgtgt

SEQ ID NO: 1330 - DNA, 16 bp, Artificial Sequence
  Detection oligonucleotide for RAF1
aattttgacgcgtttt

SEQ ID NO: 1331 - DNA, 19 bp, Artificial Sequence
  Detection oligonucleotide for RAF1
ttaattttgatgtgttttt

SEQ ID NO: 1332 - DNA, 17 bp, Artificial Sequence
  Detection oligonucleotide for RAF1
aattacggtttcgttat

SEQ ID NO: 1333 - DNA, 19 bp, Artificial Sequence
  Detection oligonucleotide for RAF1
tatggttttgttatttgat

SEQ ID NO: 1334 - DNA, 17 bp, Artificial Sequence
  Detection oligonucleotide for RARB
ggatgttgagaatgtga

SEQ ID NO: 1335 - DNA, 17 bp, Artificial Sequence
  Detection oligonucleotide for RARB
gaatgtatttggaaggt

SEQ ID NO: 1336 - DNA, 16 bp, Artificial Sequence
  Detection oligonucleotide for SFN
tgtgcgatatcgtgtt

SEQ ID NO: 1337 - DNA, 17 bp, Artificial Sequence
  Detection oligonucleotide for SFN
tgtgatattgtgttggg

SEQ ID NO: 1338 - DNA, 16 bp, Artificial Sequence
  Detection oligonucleotide for SFN
gtcgagagtcgggttt

SEQ ID NO: 1339 - DNA, 17 bp, Artificial Sequence
  Detection oligonucleotide for SFN
gttgagagttgggtttt

SEQ ID NO: 1340 - DNA, 16 bp, Artificial Sequence
  Detection oligonucleotide for SFN
ttcgaggtgcgtgagt

SEQ ID NO: 1341 - DNA, 17 bp, Artificial Sequence
  Detection oligonucleotide for SFN
tttgaggtgtgtgagta

SEQ ID NO: 1342 - DNA, 16 bp, Artificial Sequence
  Detection oligonucleotide for SFN
tgcgtgagtatcggga

SEQ ID NO: 1343 - DNA, 16 bp, Artificial Sequence
  Detection oligonucleotide for SFN
tgtgtgagtattggga

SEQ ID NO: 1344 - DNA, 16 bp, Artificial Sequence
  Detection oligonucleotide for SRC
agagtttacggtgagg

SEQ ID NO: 1345 - DNA, 16 bp, Artificial Sequence
  Detection oligonucleotide for SRC
agagtttatggtgagg

SEQ ID NO: 1346 - DNA, 16 bp, Artificial Sequence
  Detection oligonucleotide for SRC
gaacgtcgagggaaaa

SEQ ID NO: 1347 - DNA, 16 bp, Artificial Sequence
  Detection oligonucleotide for SRC
attgggaatgttgagg

SEQ ID NO: 1348 - DNA, 17 bp, Artificial Sequence
  Detection oligonucleotide for SRC
tattcgaggttttacga

SEQ ID NO: 1349 - DNA, 17 bp, Artificial Sequence
  Detection oligonucleotide for SRC
tttgaggttttatgagg

SEQ ID NO: 1350 - DNA, 17 bp, Artificial Sequence
  Detection oligonucleotide for SRC
aattcggtatttttcga

SEQ ID NO: 1351 - DNA, 18 bp, Artificial Sequence
  Detection oligonucleotide for SRC
atttggtattttttgagg

SEQ ID NO: 1352 - DNA, 17 bp, Artificial Sequence
  Detection oligonucleotide for SRC
ttttaggtcggtagtat

SEQ ID NO: 1353 - DNA, 18 bp, Artificial Sequence
  Detection oligonucleotide for SRC
ttttaggttggtagtatt

SEQ ID NO: 1354 - DNA, 16 bp, Artificial Sequence
  Detection oligonucleotide for SRC
tttttcgagggagcga

SEQ ID NO: 1355 - DNA, 17 bp, Artificial Sequence
  Detection oligonucleotide for SRC
attttttgagggagtga

SEQ ID NO: 1356 - DNA, 17 bp, Artificial Sequence
  Detection oligonucleotide for SRC
attaaacgtagtttggt

SEQ ID NO: 1357 - DNA, 18 bp, Artificial Sequence
  Detection oligonucleotide for SRC
gattaaatgtagtttggt

SEQ ID NO: 1358 - DNA, 16 bp, Artificial Sequence
  Detection oligonucleotide for GSK3B
tttcgagggacggaag

SEQ ID NO: 1359 - DNA, 16 bp, Artificial Sequence
  Detection oligonucleotide for GSK3B
ttttgagggatggaag

SEQ ID NO: 1360 - DNA, 17 bp, Artificial Sequence
  Detection oligonucleotide for GSK3B
tatcgagtagagtcgag

SEQ ID NO: 1361 - DNA, 17 bp, Artificial Sequence
  Detection oligonucleotide for GSK3B
attgagtagagttgagg

SEQ ID NO: 1362 - DNA, 16 bp, Artificial Sequence
  Detection oligonucleotide for GSK3B
taaagcgcggatattt

SEQ ID NO: 1363 - DNA, 16 bp, Artificial Sequence
  Detection oligonucleotide for GSK3B
gggtaaagtgtggata

SEQ ID NO: 1364 - DNA, 16 bp, Artificial Sequence
  Detection oligonucleotide for GSK3B
tttcgtagtcgttgat

SEQ ID NO: 1365 - DNA, 17 bp, Artificial Sequence
  Detection oligonucleotide for GSK3B
ggttttgtagttgttga

SEQ ID NO: 1366 - DNA, 18 bp, Artificial Sequence
  Detection oligonucleotide for ESR1
ataaatgtgaaagatgga

SEQ ID NO: 1367 - DNA, 16 bp, Artificial Sequence
  Detection oligonucleotide for VEGF
ggtcgagcgtttttta

SEQ ID NO: 1368 - DNA, 17 bp, Artificial Sequence
  Detection oligonucleotide for VEGF
tggttgagtgtttttta

SEQ ID NO: 1369 - DNA, 16 bp, Artificial Sequence
  Detection oligonucleotide for VEGF
attttcgaagacgttg

SEQ ID NO: 1370 - DNA, 18 bp, Artificial Sequence
  Detection oligonucleotide for VEGF
atttttgaagatgttgtt

SEQ ID NO: 1371 - DNA, 20 bp, Artificial Sequence
  Detection oligonucleotide for VEGF
atatacgtttttattttcga

SEQ ID NO: 1372 - DNA, 20 bp, Artificial Sequence
  Detection oligonucleotide for VEGF
tatgtttttatttttgaaga

SEQ ID NO: 1373 - DNA, 16 bp, Artificial Sequence
  Detection oligonucleotide for BAD
tagggtagcggtcgtt

SEQ ID NO: 1374 - DNA, 17 bp, Artificial Sequence
  Detection oligonucleotide for BAD
ttagggtagtggttgtt

SEQ ID NO: 1375 - DNA, 16 bp, Artificial Sequence
  Detection oligonucleotide for BAD
atattcgtcgggttag

SEQ ID NO: 1376 - DNA, 16 bp, Artificial Sequence
  Detection oligonucleotide for BAD
atttgttgggttaggg

SEQ ID NO: 1377 - DNA, 18 bp, Artificial Sequence
  Detection oligonucleotide for BAD
gagtcggttgatattcgt

SEQ ID NO: 1378 - DNA, 18 bp, Artificial Sequence
  Detection oligonucleotide for BAD
gagttggttgatatttgt

SEQ ID NO: 1379 - DNA, 17 bp, Artificial Sequence
  Detection oligonucleotide for BCL2L1
tgaatgtttgttggtat

SEQ ID NO: 1380 - DNA, 17 bp, Artificial Sequence
  Detection oligonucleotide for BCL2L1
tatttattgtggggttg

SEQ ID NO: 1381 - DNA, 17 bp, Artificial Sequence
  Detection oligonucleotide for BCL2L2(BCLW)
tttcgagatgtttcgaa

SEQ ID NO: 1382 - DNA, 18 bp, Artificial Sequence
  Detection oligonucleotide for BCL2L2(BCLW)
tttgagatgttttgaagt

SEQ ID NO: 1383 - DNA, 16 bp, Artificial Sequence
  Detection oligonucleotide for BCL2L2(BCLW)
tttcgaagttcggtat

SEQ ID NO: 1384 - DNA, 17 bp, Artificial Sequence
  Detection oligonucleotide for BCL2L2(BCLW)
tgttttgaagtttggta

SEQ ID NO: 1385 - DNA, 16 bp, Artificial Sequence
  Detection oligonucleotide for BCL2L2(BCLW)
agttcgagattcgttt

SEQ ID NO: 1386 - DNA, 17 bp, Artificial Sequence
  Detection oligonucleotide for BCL2L2(BCLW)
atgagtttgagatttgt

SEQ ID NO: 1387 - DNA, 16 bp, Artificial Sequence
  Detection oligonucleotide for BCL2L2(BCLW)
attcgttttcggcgta

SEQ ID NO: 1388 - DNA, 17 bp, Artificial Sequence
  Detection oligonucleotide for BCL2L2(BCLW)
agatttgtttttggtgt

SEQ ID NO: 1389 - DNA, 17 bp, Artificial Sequence
  Detection oligonucleotide for MCL1
tttcggatttattcgtt

SEQ ID NO: 1390 - DNA, 19 bp, Artificial Sequence
  Detection oligonucleotide for MCL1
tttggatttatttgttaag

SEQ ID NO: 1391 - DNA, 16 bp, Artificial Sequence
  Detection oligonucleotide for MCL1
taattacgagacggtt

SEQ ID NO: 1392 - DNA, 19 bp, Artificial Sequence
  Detection oligonucleotide for MCL1
attatgagatggtttttta

SEQ ID NO: 1393 - DNA, 16 bp, Artificial Sequence
  Detection oligonucleotide for MCL1
agattttacgacgggt

SEQ ID NO: 1394 - DNA, 16 bp, Artificial Sequence
  Detection oligonucleotide for MCL1
tttatgatgggttggg

SEQ ID NO: 1395 - DNA, 16 bp, Artificial Sequence
  Detection oligonucleotide for CDK6
aggttttgcgcgattt

SEQ ID NO: 1396 - DNA, 17 bp, Artificial Sequence
  Detection oligonucleotide for CDK6
gaggttttgtgtgattt

SEQ ID NO: 1397 - DNA, 16 bp, Artificial Sequence
  Detection oligonucleotide for CDK6
gtcgagtcgggaattt

SEQ ID NO: 1398 - DNA, 16 bp, Artificial Sequence
  Detection oligonucleotide for CDK6
ggttgagttgggaatt

SEQ ID NO: 1399 - DNA, 20 bp, Artificial Sequence
  Detection oligonucleotide for CDK6
attttcgagtattttaacgt

SEQ ID NO: 1400 - DNA, 20 bp, Artificial Sequence
  Detection oligonucleotide for CDK6
atttttgagtattttaatgt

SEQ ID NO: 1401 - DNA, 17 bp, Artificial Sequence
  Detection oligonucleotide for PDPK1
gtcgggaaaattcgttt

SEQ ID NO: 1402 - DNA, 17 bp, Artificial Sequence
  Detection oligonucleotide for PDPK1
gttgggaaaatttgttt

SEQ ID NO: 1403 - DNA, 17 bp, Artificial Sequence
  Detection oligonucleotide for PDPK1
aattcgttttttacggt

SEQ ID NO: 1404 - DNA, 19 bp, Artificial Sequence
  Detection oligonucleotide for PDPK1
aaaatttgttttttatggt

SEQ ID NO: 1405 - DNA, 16 bp, Artificial Sequence
  Detection oligonucleotide for PDPK1
tttacggttcggttaa

SEQ ID NO: 1406 - DNA, 17 bp, Artificial Sequence
  Detection oligonucleotide for PDPK1
ttatggtttggttaagg

SEQ ID NO: 1407 - DNA, 18 bp, Artificial Sequence
  Detection oligonucleotide for PIK3CA
aagtattggtatttgagt

SEQ ID NO: 1408 - DNA, 17 bp, Artificial Sequence
  Detection oligonucleotide for PIK3CA
tttttacgtaggattgg

SEQ ID NO: 1409 - DNA, 18 bp, Artificial Sequence
  Detection oligonucleotide for PIK3CA
tttttatgtaggattggt

SEQ ID NO: 1410 - DNA, 20 bp, Artificial Sequence
  Detection oligonucleotide for PIK3CA
atatttatgttgtagatagt

SEQ ID NO: 1411 - DNA, 17 bp, Artificial Sequence
  Detection oligonucleotide for PIK3CA
gtatttcgagaagtagg

SEQ ID NO: 1412 - DNA, 18 bp, Artificial Sequence
  Detection oligonucleotide for PIK3CA
gtattttgagaagtagga

SEQ ID NO: 1413 - DNA, 16 bp, Artificial Sequence
  Detection oligonucleotide for MAPK1
ggtttaggcgagcgat

SEQ ID NO: 1414 - DNA, 16 bp, Artificial Sequence
  Detection oligonucleotide for MAPK1
ggtttaggtgagtgat

SEQ ID NO: 1415 - DNA, 18 bp, Artificial Sequence
  Detection oligonucleotide for MAPK1
tagtgttgtagtttaggt

SEQ ID NO: 1416 - DNA, 16 bp, Artificial Sequence
  Detection oligonucleotide for RPS6KA2
ttgtcgttagtagcgg

SEQ ID NO: 1417 - DNA, 17 bp, Artificial Sequence
  Detection oligonucleotide for RPS6KA2
tgttgttagtagtgggt

SEQ ID NO: 1418 - DNA, 16 bp, Artificial Sequence
  Detection oligonucleotide for RPS6KA2
ttaaggcggatttcga

SEQ ID NO: 1419 - DNA, 17 bp, Artificial Sequence
  Detection oligonucleotide for RPS6KA2
ttaaggtggattttgag

SEQ ID NO: 1420 - DNA, 16 bp, Artificial Sequence
  Detection oligonucleotide for RPS6KA2
agttcgtattttcggt

SEQ ID NO: 1421 - DNA, 18 bp, Artificial Sequence
  Detection oligonucleotide for RPS6KA2
tgagtttgtatttttggt

SEQ ID NO: 1422 - DNA, 16 bp, Artificial Sequence
  Detection oligonucleotide for RPS6KA2
tacggggtcgtgagtt

SEQ ID NO: 1423 - DNA, 16 bp, Artificial Sequence
  Detection oligonucleotide for RPS6KA2
tatggggttgtgagtt

SEQ ID NO: 1424 - DNA, 17 bp, Artificial Sequence
  Detection oligonucleotide for EREG
ttttgggttttaatggg

SEQ ID NO: 1425 - DNA, 17 bp, Artificial Sequence
  Detection oligonucleotide for EREG
tggtgttgtgaatttta

SEQ ID NO: 1426 - DNA, 19 bp, Artificial Sequence
  Detection oligonucleotide for RASSF1
tttattttggatggttata

SEQ ID NO: 1427 - DNA, 17 bp, Artificial Sequence
  Detection oligonucleotide for RASSF1
gatggtgattgtaaagt

SEQ ID NO: 1428 - DNA, 18 bp, Artificial Sequence
  Detection oligonucleotide for RASSF1
ttatgtggagatatttgt

SEQ ID NO: 1429 - DNA, 17 bp, Artificial Sequence
  Detection oligonucleotide for RASSF1
gggtgtgtttttgtaga

SEQ ID NO: 1430 - DNA, 16 bp, Artificial Sequence
  Detection oligonucleotide for ERCC1
atcgaggcggtttatt

SEQ ID NO: 1431 - DNA, 16 bp, Artificial Sequence
  Detection oligonucleotide for ERCC1
ggattgaggtggttta

SEQ ID NO: 1432 - DNA, 16 bp, Artificial Sequence
  Detection oligonucleotide for ERCC1
ttagtacggttagcgt

SEQ ID NO: 1433 - DNA, 16 bp, Artificial Sequence
  Detection oligonucleotide for ERCC1
agtatggttagtgtgg

SEQ ID NO: 1434 - DNA, 18 bp, Artificial Sequence
  Detection oligonucleotide for ERCC1
ttcgtagtattttcggtt

SEQ ID NO: 1435 - DNA, 18 bp, Artificial Sequence
  Detection oligonucleotide for ERCC1
gtttgtagtatttttggt

SEQ ID NO: 1436 - DNA, 16 bp, Artificial Sequence
  Detection oligonucleotide for IGF1R
atatttgatgggggag

SEQ ID NO: 1437 - DNA, 19 bp, Artificial Sequence
  Detection oligonucleotide for IGF1R
aagttttatgtatgatgtt

SEQ ID NO: 1438 - DNA, 16 bp, Artificial Sequence
  Detection oligonucleotide for IGF1R
ggtgcgttaatatcga

SEQ ID NO: 1439 - DNA, 18 bp, Artificial Sequence
  Detection oligonucleotide for IGF1R
taggtgtgttaatattga

SEQ ID NO: 1440 - DNA, 21 bp, Artificial Sequence
  Detection oligonucleotide for IGF1R
tatgtttttgataattagaat

SEQ ID NO: 1441 - DNA, 16 bp, Artificial Sequence
  Detection oligonucleotide for PIK3R2
tttagagacgttcgag

SEQ ID NO: 1442 - DNA, 18 bp, Artificial Sequence
  Detection oligonucleotide for PIK3R2
ggtttagagatgtttgag

SEQ ID NO: 1443 - DNA, 17 bp, Artificial Sequence
  Detection oligonucleotide for PIK3R2
tagtcgagtgtaatcgg

SEQ ID NO: 1444 - DNA, 17 bp, Artificial Sequence
  Detection oligonucleotide for PIK3R2
agttgagtgtaattggg

SEQ ID NO: 1445 - DNA, 16 bp, Artificial Sequence
  Detection oligonucleotide for PIK3R2
tttcgagatagtcgag

SEQ ID NO: 1446 - DNA, 18 bp, Artificial Sequence
  Detection oligonucleotide for PIK3R2
tgtttttgagatagttga

SEQ ID NO: 1447 - DNA, 16 bp, Artificial Sequence
  Detection oligonucleotide for PIK3R2
tacggtcgtattggta

SEQ ID NO: 1448 - DNA, 18 bp, Artificial Sequence
  Detection oligonucleotide for PIK3R2
ttatggttgtattggtat

SEQ ID NO: 1449 - DNA, 16 bp, Artificial Sequence
  Detection oligonucleotide for GSS(GSH)
agcgggttcgtgaagt

SEQ ID NO: 1450 - DNA, 16 bp, Artificial Sequence
  Detection oligonucleotide for GSS(GSH)
agtgggtttgtgaagt

SEQ ID NO: 1451 - DNA, 16 bp, Artificial Sequence
  Detection oligonucleotide for GSS(GSH)
tataacggggagcgat

SEQ ID NO: 1452 - DNA, 16 bp, Artificial Sequence
  Detection oligonucleotide for GSS(GSH)
aatggggagtgattag

SEQ ID NO: 1453 - DNA, 16 bp, Artificial Sequence
  Detection oligonucleotide for GSS(GSH)
tttagatcgggtcggt

SEQ ID NO: 1454 - DNA, 16 bp, Artificial Sequence
  Detection oligonucleotide for GSS(GSH)
tttagattgggttggt

SEQ ID NO: 1455 - DNA, 16 bp, Artificial Sequence
  Detection oligonucleotide for GSS(GSH)
ttggcgcgtattgatt

SEQ ID NO: 1456 - DNA, 17 bp, Artificial Sequence
  Detection oligonucleotide for GSS(GSH)
ttggtgtgtattgattt

SEQ ID NO: 1457 - DNA, 17 bp, Artificial Sequence
  Detection oligonucleotide for EGF
taggattgatttggaga

SEQ ID NO: 1458 - DNA, 16 bp, Artificial Sequence
  Detection oligonucleotide for EGF
tagatacggtagtcgt

SEQ ID NO: 1459 - DNA, 18 bp, Artificial Sequence
  Detection oligonucleotide for EGF
agatatggtagttgtttt

SEQ ID NO: 1460 - DNA, 19 bp, Artificial Sequence
  Detection oligonucleotide for EGF
tagttgtttcgatatttta

SEQ ID NO: 1461 - DNA, 20 bp, Artificial Sequence
  Detection oligonucleotide for EGF
agttgttttgatattttatt

SEQ ID NO: 1462 - DNA, 17 bp, Artificial Sequence
  Detection oligonucleotide for EGF
atgtagattgaagggtt

SEQ ID NO: 1463 - DNA, 16 bp, Artificial Sequence
  Detection oligonucleotide for IGF1
attgaatcggtggagt

SEQ ID NO: 1464 - DNA, 16 bp, Artificial Sequence
  Detection oligonucleotide for IGF1
attgaattggtggagt

SEQ ID NO: 1465 - DNA, 16 bp, Artificial Sequence
  Detection oligonucleotide for IGF1
ggaaagtcgtagtggt

SEQ ID NO: 1466 - DNA, 16 bp, Artificial Sequence
  Detection oligonucleotide for IGF1
ggaaagttgtagtggt

SEQ ID NO: 1467 - DNA, 20 bp, Artificial Sequence
  Detection oligonucleotide for IGF1
ttatatatgaattgaagagt

SEQ ID NO: 1468 - DNA, 18 bp, Artificial Sequence
  Detection oligonucleotide for IGF1
tttagttttgtagagtgt

SEQ ID NO: 1469 - DNA, 17 bp, Artificial Sequence
  Detection oligonucleotide for IGF1
tggtagagacgttttat

SEQ ID NO: 1470 - DNA, 18 bp, Artificial Sequence
  Detection oligonucleotide for IGF1
ggtagagatgttttatga

SEQ ID NO: 1471 - DNA, 17 bp, Artificial Sequence
  Detection oligonucleotide for IGF1
agagtgtttttggttta

SEQ ID NO: 1472 - DNA, 16 bp, Artificial Sequence
  Detection oligonucleotide for STAT1
aagaaacggtggaagt

SEQ ID NO: 1473 - DNA, 16 bp, Artificial Sequence
  Detection oligonucleotide for STAT1
aagaaatggtggaagt

SEQ ID NO: 1474 - DNA, 20 bp, Artificial Sequence
  Detection oligonucleotide for STAT1
ttatgtatagtatgttaggt

SEQ ID NO: 1475 - DNA, 18 bp, Artificial Sequence
  Detection oligonucleotide for STAT1
atatagagtgtgaatgtt

SEQ ID NO: 1476 - DNA, 16 bp, Artificial Sequence
  Detection oligonucleotide for STAT5A
ttattcgacggttagg

SEQ ID NO: 1477 - DNA, 17 bp, Artificial Sequence
  Detection oligonucleotide for STAT5A
tatttgatggttagggt

SEQ ID NO: 1478 - DNA, 19 bp, Artificial Sequence
  Detection oligonucleotide for STAT5A
tacgacggtttttattcga

SEQ ID NO: 1479 - DNA, 19 bp, Artificial Sequence
  Detection oligonucleotide for STAT5A
tatgatggtttttatttga

SEQ ID NO: 1480 - DNA, 16 bp, Artificial Sequence
  Detection oligonucleotide for STAT5A
taggttagcgttacga

SEQ ID NO: 1481 - DNA, 18 bp, Artificial Sequence
  Detection oligonucleotide for STAT5A
gttaggttagtgttatga

SEQ ID NO: 1482 - DNA, 16 bp, Artificial Sequence
  Detection oligonucleotide for ADAM10
atgagcgttgaacgag

SEQ ID NO: 1483 - DNA, 16 bp, Artificial Sequence
  Detection oligonucleotide for ADAM10
gagtgttgaatgagga

SEQ ID NO: 1484 - DNA, 16 bp, Artificial Sequence
  Detection oligonucleotide for ADAM10
ggcgagatcgttagtt

SEQ ID NO: 1485 - DNA, 18 bp, Artificial Sequence
  Detection oligonucleotide for ADAM10
gagattgttagttttgtt

SEQ ID NO: 1486 - DNA, 16 bp, Artificial Sequence
  Detection oligonucleotide for ADAM10
gttcgtcgagtagatt

SEQ ID NO: 1487 - DNA, 18 bp, Artificial Sequence
  Detection oligonucleotide for ADAM10
gtttgttgagtagattgg

SEQ ID NO: 1488 - DNA, 19 bp, Artificial Sequence
  Detection oligonucleotide for AREG
atattgttgatgatttagt

SEQ ID NO: 1489 - DNA, 17 bp, Artificial Sequence
  Detection oligonucleotide for AREG
tgaattgtttttgggag

SEQ ID NO: 1490 - DNA, 17 bp, Artificial Sequence
  Detection oligonucleotide for AREG
tttgggagttgattatg

SEQ ID NO: 1491 - DNA, 16 bp, Artificial Sequence
  Detection oligonucleotide for AREG
ttcgattttgcgtcgt

SEQ ID NO: 1492 - DNA, 18 bp, Artificial Sequence
  Detection oligonucleotide for AREG
tttgattttgtgttgtag

SEQ ID NO: 1493 - DNA, 21 bp, Artificial Sequence
  Detection oligonucleotide for AREG
agtatgataatgaattataaa

SEQ ID NO: 1494 - DNA, 16 bp, Artificial Sequence
  Detection oligonucleotide for CDK4
gaacgtcggacgtttt

SEQ ID NO: 1495 - DNA, 17 bp, Artificial Sequence
  Detection oligonucleotide for CDK4
aatgttggatgttttgg

SEQ ID NO: 1496 - DNA, 18 bp, Artificial Sequence
  Detection oligonucleotide for CDK4
tgatcgttatttatgcgt

SEQ ID NO: 1497 - DNA, 19 bp, Artificial Sequence
  Detection oligonucleotide for CDK4
tgattgttatttatgtgtt

SEQ ID NO: 1498 - DNA, 16 bp, Artificial Sequence
  Detection oligonucleotide for CDK4
atacgtgatcgtttga

SEQ ID NO: 1499 - DNA, 19 bp, Artificial Sequence
  Detection oligonucleotide for CDK4
atatgtgattgtttgatat

SEQ ID NO: 1500 - DNA, 16 bp, Artificial Sequence
  Detection oligonucleotide for DTR(HB-EGF)
ggaaagttcgtgattt

SEQ ID NO: 1501 - DNA, 17 bp, Artificial Sequence
  Detection oligonucleotide for DTR(HB-EGF)
gaaagtttgtgatttgt

SEQ ID NO: 1502 - DNA, 16 bp, Artificial Sequence
  Detection oligonucleotide for DTR(HB-EGF)
gtcgggatcggaaagt

SEQ ID NO: 1503 - DNA, 16 bp, Artificial Sequence
  Detection oligonucleotide for DTR(HB-EGF)
gttgggattggaaagt

SEQ ID NO: 1504 - DNA, 18 bp, Artificial Sequence
  Detection oligonucleotide for GP1BB
agtggttatgattttgtt

SEQ ID NO: 1505 - DNA, 18 bp, Artificial Sequence
  Detection oligonucleotide for PIK3CB
tagagtattcgtttgaat

SEQ ID NO: 1506 - DNA, 19 bp, Artificial Sequence
  Detection oligonucleotide for PIK3CB
atagagtatttgtttgaat

SEQ ID NO: 1507 - DNA, 16 bp, Artificial Sequence
  Detection oligonucleotide for PIK3CB
taatcgttcgtgtttg

SEQ ID NO: 1508 - DNA, 20 bp, Artificial Sequence
  Detection oligonucleotide for PIK3CB
aattttataattgtttgtgt

SEQ ID NO: 1509 - DNA, 19 bp, Artificial Sequence
  Detection oligonucleotide for PIK3CB
aataaaacgaagtaatttg

SEQ ID NO: 1510 - DNA, 20 bp, Artificial Sequence
  Detection oligonucleotide for PIK3CB
aataaaatgaagtaatttgt

SEQ ID NO: 1511 - DNA, 16 bp, Artificial Sequence
  Detection oligonucleotide for PIK3CB
agattagcggaggtat

SEQ ID NO: 1512 - DNA, 17 bp, Artificial Sequence
  Detection oligonucleotide for PIK3CB
gagattagtggaggtat

SEQ ID NO: 1513 - DNA, 17 bp, Artificial Sequence
  Detection oligonucleotide for PLCG1
atcgagaggtagcggtt

SEQ ID NO: 1514 - DNA, 17 bp, Artificial Sequence
  Detection oligonucleotide for PLCG1
attgagaggtagtggtt

SEQ ID NO: 1515 - DNA, 16 bp, Artificial Sequence
  Detection oligonucleotide for PLCG1
agtcggagtttcgaat

SEQ ID NO: 1516 - DNA, 17 bp, Artificial Sequence
  Detection oligonucleotide for PLCG1
gagttggagttttgaat

SEQ ID NO: 1517 - DNA, 16 bp, Artificial Sequence
  Detection oligonucleotide for PLCG1
ggacggagcgtgtaga

SEQ ID NO: 1518 - DNA, 16 bp, Artificial Sequence
  Detection oligonucleotide for PLCG1
ggatggagtgtgtaga

SEQ ID NO: 1519 - DNA, 16 bp, Artificial Sequence
  Detection oligonucleotide for PTPRCAP(RPS6KB2)
agtggcgaggcgttta

SEQ ID NO: 1520 - DNA, 16 bp, Artificial Sequence
  Detection oligonucleotide for PTPRCAP(RPS6KB2)
agtggtgaggtgttta

SEQ ID NO: 1521 - DNA, 16 bp, Artificial Sequence
  Detection oligonucleotide for PTPRCAP(RPS6KB2)
tttcgtcgtaaggttt

SEQ ID NO: 1522 - DNA, 17 bp, Artificial Sequence
  Detection oligonucleotide for PTPRCAP(RPS6KB2)
ggtttttgttgtaaggt

SEQ ID NO: 1523 - DNA, 16 bp, Artificial Sequence
  Detection oligonucleotide for MAP2K1
agtcgtgttgacgaaa

SEQ ID NO: 1524 - DNA, 17 bp, Artificial Sequence
  Detection oligonucleotide for MAP2K1
agttgtgttgatgaaaa

SEQ ID NO: 1525 - DNA, 16 bp, Artificial Sequence
  Detection oligonucleotide for MAP2K1
ttttgcggtaatcggt

SEQ ID NO: 1526 - DNA, 17 bp, Artificial Sequence
  Detection oligonucleotide for MAP2K1
tttttgtggtaattggt

SEQ ID NO: 1527 - DNA, 16 bp, Artificial Sequence
  Detection oligonucleotide for MAP2K1
tgtcgcgcggttttta

SEQ ID NO: 1528 - DNA, 17 bp, Artificial Sequence
  Detection oligonucleotide for MAP2K1
ttaggtgttgtgtggtt

SEQ ID NO: 1529 - DNA, 17 bp, Artificial Sequence
  Detection oligonucleotide for STK15(STK6)
agtgtatggagaatttg

SEQ ID NO: 1530 - DNA, 16 bp, Artificial Sequence
  Detection oligonucleotide for BTC
tagcggcgttagtttt

SEQ ID NO: 1531 - DNA, 17 bp, Artificial Sequence
  Detection oligonucleotide for BTC
tgtagtggtgttagttt

SEQ ID NO: 1532 - DNA, 17 bp, Artificial Sequence
  Detection oligonucleotide for BTC
ggcggttcggtttatta

SEQ ID NO: 1533 - DNA, 18 bp, Artificial Sequence
  Detection oligonucleotide for BTC
ggtggtttggtttattaa

SEQ ID NO: 1534 - DNA, 17 bp, Artificial Sequence
  Detection oligonucleotide for BTC
tgatggattgggttgtt

SEQ ID NO: 1535 - DNA, 17 bp, Artificial Sequence
  Detection oligonucleotide for BTC
ttttgggtgtttgagag

SEQ ID NO: 1536 - DNA, 17 bp, Artificial Sequence
  Detection oligonucleotide for FOXF1
aggttgttggttgagtt

SEQ ID NO: 1537 - DNA, 17 bp, Artificial Sequence
  Detection oligonucleotide for FOXF1
aggttgttttttagtgt

SEQ ID NO: 1538 - DNA, 18 bp, Artificial Sequence
  Detection oligonucleotide for FOXF1
ttatgttgtttggtaagt

SEQ ID NO: 1539 - DNA, 16 bp, Artificial Sequence
  Detection oligonucleotide for NOTCH3
atcgttcggagtggag

SEQ ID NO: 1540 - DNA, 16 bp, Artificial Sequence
  Detection oligonucleotide for NOTCH3
gattgtttggagtgga

SEQ ID NO: 1541 - DNA, 17 bp, Artificial Sequence
  Detection oligonucleotide for NOTCH3
tgtttcgtttttcgata

SEQ ID NO: 1542 - DNA, 18 bp, Artificial Sequence
  Detection oligonucleotide for NOTCH3
tttgttttttgataggtg

SEQ ID NO: 1543 - DNA, 16 bp, Artificial Sequence
  Detection oligonucleotide for NOTCH3
atgagttcgcggttgt

SEQ ID NO: 1544 - DNA, 16 bp, Artificial Sequence
  Detection oligonucleotide for NOTCH3
atgagtttgtggttgt

SEQ ID NO: 1545 - DNA, 16 bp, Artificial Sequence
  Detection oligonucleotide for NOTCH3
agtttcgcgtttggaa

SEQ ID NO: 1546 - DNA, 17 bp, Artificial Sequence
  Detection oligonucleotide for NOTCH3
agttttgtgtttggaat

SEQ ID NO: 1547 - DNA, 16 bp, Artificial Sequence
  Detection oligonucleotide for CSNK2A1
tagttcgataatgcgt

SEQ ID NO: 1548 - DNA, 18 bp, Artificial Sequence
  Detection oligonucleotide for CSNK2A1
gtagtttgataatgtgtt

SEQ ID NO: 1549 - DNA, 16 bp, Artificial Sequence
  Detection oligonucleotide for CSNK2A1
aatgcgtttatcgttt

SEQ ID NO: 1550 - DNA, 19 bp, Artificial Sequence
  Detection oligonucleotide for CSNK2A1
gataatgtgtttattgttt

SEQ ID NO: 1551 - DNA, 16 bp, Artificial Sequence
  Detection oligonucleotide for CSNK2A1
atcggtatcggatttg

SEQ ID NO: 1552 - DNA, 18 bp, Artificial Sequence
  Detection oligonucleotide for CSNK2A1
tattggtattggatttga

SEQ ID NO: 1553 - DNA, 17 bp, Artificial Sequence
  Detection oligonucleotide for SHC1
taaagtttttgtggtgg

SEQ ID NO: 1554 - DNA, 18 bp, Artificial Sequence
  Detection oligonucleotide for SHC1
tttatttgagttttgtgt

SEQ ID NO: 1555 - DNA, 17 bp, Artificial Sequence
  Detection oligonucleotide for SHC1
aggaaattttgggtttt

SEQ ID NO: 1556 - DNA, 17 bp, Artificial Sequence
  Detection oligonucleotide for SHC1
ttaaattggtttgtggt

SEQ ID NO: 1557 - DNA, 17 bp, Artificial Sequence
  Detection oligonucleotide for SHC1
gttggagtggtaattta

SEQ ID NO: 1558 - DNA, 16 bp, Artificial Sequence
  Detection oligonucleotide for RPS6KA1
ttagtagcggtgaagt

SEQ ID NO: 1559 - DNA, 17 bp, Artificial Sequence
  Detection oligonucleotide for RPS6KA1
tttagtagtggtgaagt

SEQ ID NO: 1560 - DNA, 17 bp, Artificial Sequence
  Detection oligonucleotide for RPS6KA1
agattagcggatttttt

SEQ ID NO: 1561 - DNA, 18 bp, Artificial Sequence
  Detection oligonucleotide for RPS6KA1
gaagattagtggattttt

SEQ ID NO: 1562 - DNA, 16 bp, Artificial Sequence
  Detection oligonucleotide for RPS6KA1
atagatgtcgggacgg

SEQ ID NO: 1563 - DNA, 16 bp, Artificial Sequence
  Detection oligonucleotide for RPS6KA1
atagatgttgggatgg

SEQ ID NO: 1564 - DNA, 17 bp, Artificial Sequence
  Detection oligonucleotide for RPS6KA1
aggaagtttcgatagtt

SEQ ID NO: 1565 - DNA, 18 bp, Artificial Sequence
  Detection oligonucleotide for RPS6KA1
aggaagttttgatagttt

SEQ ID NO: 1566 - DNA, 16 bp, Artificial Sequence
  Detection oligonucleotide for RPS6KA1
tagggggacgtaattt

SEQ ID NO: 1567 - DNA, 17 bp, Artificial Sequence
  Detection oligonucleotide for RPS6KA1
tagggggatgtaatttt

SEQ ID NO: 1568 - DNA, 18 bp, Artificial Sequence
  Detection oligonucleotide for RPS6KA1
tttcgttttagaaacgat

SEQ ID NO: 1569 - DNA, 19 bp, Artificial Sequence
  Detection oligonucleotide for RPS6KA1
agttttgttttagaaatga

SEQ ID NO: 1570 - DNA, 16 bp, Artificial Sequence
  Detection oligonucleotide for TGFA
tagcgagtcgtatgtt

SEQ ID NO: 1571 - DNA, 17 bp, Artificial Sequence
  Detection oligonucleotide for TGFA
attttgtagtgagttgt

SEQ ID NO: 1572 - DNA, 18 bp, Artificial Sequence
  Detection oligonucleotide for TGFA
tatacgggttaaattcgg

SEQ ID NO: 1573 - DNA, 18 bp, Artificial Sequence
  Detection oligonucleotide for TGFA
atatgggttaaatttggg

SEQ ID NO: 1574 - DNA, 16 bp, Artificial Sequence
  Detection oligonucleotide for TGFA
gggtatatcgaacgaa

SEQ ID NO: 1575 - DNA, 18 bp, Artificial Sequence
  Detection oligonucleotide for TGFA
ggggtatattgaatgaat

SEQ ID NO: 1576 - DNA, 16 bp, Artificial Sequence
  Detection oligonucleotide for ABCC6
tgatcgtttaagcgtt

SEQ ID NO: 1577 - DNA, 17 bp, Artificial Sequence
  Detection oligonucleotide for ABCC6
ggtgattgtttaagtgt

SEQ ID NO: 1578 - DNA, 16 bp, Artificial Sequence
  Detection oligonucleotide for ABCC6
taatcgcggggattat

SEQ ID NO: 1579 - DNA, 17 bp, Artificial Sequence
  Detection oligonucleotide for ABCC6
gtttaattgtggggatt

SEQ ID NO: 1580 - DNA, 17 bp, Artificial Sequence
  Detection oligonucleotide for ABCC6
gtcgaggtcgagaggat

SEQ ID NO: 1581 - DNA, 17 bp, Artificial Sequence
  Detection oligonucleotide for ABCC6
gttgaggttgagaggat

SEQ ID NO: 1582 - DNA, 16 bp, Artificial Sequence
  Detection oligonucleotide for ABCC6
agatcgcgttataggt

SEQ ID NO: 1583 - DNA, 17 bp, Artificial Sequence
  Detection oligonucleotide for ABCC6
gatggagattgtgttat

SEQ ID NO: 1584 - DNA, 16 bp, Artificial Sequence
  Detection oligonucleotide for RPS6KA4
tttcgtgtcgtagatt

SEQ ID NO: 1585 - DNA, 17 bp, Artificial Sequence
  Detection oligonucleotide for RPS6KA4
attggttttgtgttgta

SEQ ID NO: 1586 - DNA, 16 bp, Artificial Sequence
  Detection oligonucleotide for RPS6KA4
tgtagcgaggacgtat

SEQ ID NO: 1587 - DNA, 16 bp, Artificial Sequence
  Detection oligonucleotide for RPS6KA4
agtgaggatgtattgg

SEQ ID NO: 1588 - DNA, 16 bp, Artificial Sequence
  Detection oligonucleotide for RPS6KA3
tatcgggggcgtagtt

SEQ ID NO: 1589 - DNA, 16 bp, Artificial Sequence
  Detection oligonucleotide for RPS6KA3
tattgggggtgtagtt

SEQ ID NO: 1590 - DNA, 16 bp, Artificial Sequence
  Detection oligonucleotide for RPS6KA3
ggcgtagtttcgagtt

SEQ ID NO: 1591 - DNA, 16 bp, Artificial Sequence
  Detection oligonucleotide for RPS6KA3
gggtgtagttttgagt

SEQ ID NO: 1592 - DNA, 16 bp, Artificial Sequence
  Detection oligonucleotide for RPS6KA3
gggcgtatttcgtaat

SEQ ID NO: 1593 - DNA, 18 bp, Artificial Sequence
  Detection oligonucleotide for RPS6KA3
ttgggtgtattttgtaat

SEQ ID NO: 1594 - DNA, 18 bp, Artificial Sequence
  Detection oligonucleotide for STK12(AURKB)
tttggttgtttgtaaata

SEQ ID NO: 1595 - DNA, 17 bp, Artificial Sequence
  Detection oligonucleotide for STK12(AURKB)
ttatgttgtgttttggt

SEQ ID NO: 1596 - DNA, 17 bp, Artificial Sequence
  Detection oligonucleotide for STK12(AURKB)
gggtaagtttgttgttt

SEQ ID NO: 1597 - DNA, 17 bp, Artificial Sequence
  Detection oligonucleotide for ABCG2
attagtttcgttgagag

SEQ ID NO: 1598 - DNA, 17 bp, Artificial Sequence
  Detection oligonucleotide for ABCG2
tagttttgttgagagtg

SEQ ID NO: 1599 - DNA, 17 bp, Artificial Sequence
  Detection oligonucleotide for ABCG2
ggttaagatcgagtttt

SEQ ID NO: 1600 - DNA, 18 bp, Artificial Sequence
  Detection oligonucleotide for ABCG2
tggttaagattgagtttt

SEQ ID NO: 1601 - DNA, 16 bp, Artificial Sequence
  Detection oligonucleotide for ABCG2
taaacgagacgattga

SEQ ID NO: 1602 - DNA, 18 bp, Artificial Sequence
  Detection oligonucleotide for ABCG2
taaatgagatgattgagt

SEQ ID NO: 1603 - DNA, 20 bp, Artificial Sequence
  Detection oligonucleotide for ABCG2
atcggtaatcgtttaaacga

SEQ ID NO: 1604 - DNA, 20 bp, Artificial Sequence
  Detection oligonucleotide for ABCG2
attggtaattgtttaaatga

SEQ ID NO: 1605 - DNA, 17 bp, Artificial Sequence
  Detection oligonucleotide for RASGRP2
ggtagttgtaggtggtt

SEQ ID NO: 1606 - DNA, 19 bp, Artificial Sequence
  Detection oligonucleotide for RASGRP2
taggattgtttttgtattt

SEQ ID NO: 1607 - DNA, 16 bp, Artificial Sequence
  Detection oligonucleotide for ABCC4
ataatgggatgtggag

SEQ ID NO: 1608 - DNA, 17 bp, Artificial Sequence
  Detection oligonucleotide for ABCC4
ggattgagttgttttgt

SEQ ID NO: 1609 - DNA, 17 bp, Artificial Sequence
  Detection oligonucleotide for RASGRP1
ggattttgtgttttgat

SEQ ID NO: 1610 - DNA, 16 bp, Artificial Sequence
  Detection oligonucleotide for RASGRP1
agatgtggttgtttgg

SEQ ID NO: 1611 - DNA, 19 bp, Artificial Sequence
  Detection oligonucleotide for RASGRP1
taatgttagtgtgtataga

SEQ ID NO: 1612 - DNA, 16 bp, Artificial Sequence
  Detection oligonucleotide for RASGRF1
ggtattatcgagcggt

SEQ ID NO: 1613 - DNA, 16 bp, Artificial Sequence
  Detection oligonucleotide for RASGRF1
agagcggtttgcgtta

SEQ ID NO: 1614 - DNA, 16 bp, Artificial Sequence
  Detection oligonucleotide for RASGRF1
agagtggtttgtgtta

SEQ ID NO: 1615 - DNA, 16 bp, Artificial Sequence
  Detection oligonucleotide for RASGRF1
tttcgtcgtagttgag

SEQ ID NO: 1616 - DNA, 16 bp, Artificial Sequence
  Detection oligonucleotide for RASGRF1
ttcgagcgttgttagt

SEQ ID NO: 1617 - DNA, 16 bp, Artificial Sequence
  Detection oligonucleotide for MVP
aattcgtatcgtttgg

SEQ ID NO: 1618 - DNA, 16 bp, Artificial Sequence
  Detection oligonucleotide for ADAM17(TACE)
ttcggatgattcgggt

SEQ ID NO: 1619 - DNA, 16 bp, Artificial Sequence
  Detection oligonucleotide for ADAM17(TACE)
ttggcgtcgcgatttt

SEQ ID NO: 1620 - DNA, 16 bp, Artificial Sequence
  Detection oligonucleotide for ADAM17(TACE)
taggtcgggcggattt

SEQ ID NO: 1621 - DNA, 16 bp, Artificial Sequence
  Detection oligonucleotide for ADAM17(TACE)
taggttgggtggattt

SEQ ID NO: 1622 - DNA, 16 bp, Artificial Sequence
  Detection oligonucleotide for ABCC12
aggtcggcggagattt

SEQ ID NO: 1623 - DNA, 16 bp, Artificial Sequence
  Detection oligonucleotide for ABCC12
aggttggtggagattt

SEQ ID NO: 1624 - DNA, 16 bp, Artificial Sequence
  Detection oligonucleotide for ABCC12
ggattagcgaggtcgg

SEQ ID NO: 1625 - DNA, 16 bp, Artificial Sequence
  Detection oligonucleotide for ABCC12
ggattagtgaggttgg

SEQ ID NO: 1626 - DNA, 16 bp, Artificial Sequence
  Detection oligonucleotide for PAK7
tttagcgtgcgttcgg

SEQ ID NO: 1627 - DNA, 16 bp, Artificial Sequence
  Detection oligonucleotide for PAK7
taggtaggcgcgtttg

SEQ ID NO: 1628 - DNA, 17 bp, Artificial Sequence
  Detection oligonucleotide for PAK7
tttcgttgatagtcggt

SEQ ID NO: 1629 - DNA, 17 bp, Artificial Sequence
  Detection oligonucleotide for PAK7
ttttgttgatagttggt

SEQ ID NO: 1630 - DNA, 16 bp, Artificial Sequence
  Detection oligonucleotide for PAK7
tgaggtatcgtcgttt

SEQ ID NO: 1631 - DNA, 16 bp, Artificial Sequence
  Detection oligonucleotide for AKT2
aagttcgttcgtagat

SEQ ID NO: 1632 - DNA, 16 bp, Artificial Sequence
  Detection oligonucleotide for AKT2
taagtcgggtcggtta

SEQ ID NO: 1633 - DNA, 16 bp, Artificial Sequence
  Detection oligonucleotide for AKT2
tgtcgagcgagggata

SEQ ID NO: 1634 - DNA, 16 bp, Artificial Sequence
  Detection oligonucleotide for AKT2
tgttgagtgagggata

SEQ ID NO: 1635 - DNA, 16 bp, Artificial Sequence
  Detection oligonucleotide for BCL2
tttagggacgtttcga

SEQ ID NO: 1636 - DNA, 17 bp, Artificial Sequence
  Detection oligonucleotide for BCL2
ttcgagcgtggtgttta

SEQ ID NO: 1637 - DNA, 17 bp, Artificial Sequence
  Detection oligonucleotide for BCL2
tttgagtgtggtgttta

SEQ ID NO: 1638 - DNA, 16 bp, Artificial Sequence
  Detection oligonucleotide for BCL2
aggtgttcgcgtatta

SEQ ID NO: 1639 - DNA, 16 bp, Artificial Sequence
  Detection oligonucleotide for CDKN2A
agatatcgcggttttt

SEQ ID NO: 1640 - DNA, 19 bp, Artificial Sequence
  Detection oligonucleotide for CDKN2A
ttcgagtattcgtttacgg

SEQ ID NO: 1641 - DNA, 19 bp, Artificial Sequence
  Detection oligonucleotide for CDKN2A
tttgagtatttgtttatgg

SEQ ID NO: 1642 - DNA, 18 bp, Artificial Sequence
  Detection oligonucleotide for CDKN2A
tattcgttaagtgttcgg

SEQ ID NO: 1643 - DNA, 18 bp, Artificial Sequence
  Detection oligonucleotide for CDKN2A
tatttgttaagtgtttgg

SEQ ID NO: 1644 - DNA, 16 bp, Artificial Sequence
  Detection oligonucleotide for CDKN2A
ttcgttagtatcggag

SEQ ID NO: 1645 - DNA, 18 bp, Artificial Sequence
  Detection oligonucleotide for ERBB4
gttaaatacggtaatcga

SEQ ID NO: 1646 - DNA, 16 bp, Artificial Sequence
  Detection oligonucleotide for ERBB4
taatcgacgggaaggt

SEQ ID NO: 1647 - DNA, 16 bp, Artificial Sequence
  Detection oligonucleotide for ERBB4
taggcgagtaagcgtt

SEQ ID NO: 1648 - DNA, 17 bp, Artificial Sequence
  Detection oligonucleotide for FOS
agacgtatgttttcgta

SEQ ID NO: 1649 - DNA, 16 bp, Artificial Sequence
  Detection oligonucleotide for FOS
ttttagggcgcgaaga

SEQ ID NO: 1650 - DNA, 16 bp, Artificial Sequence
  Detection oligonucleotide for FOS
ttagcgcgttggttat

SEQ ID NO: 1651 - DNA, 16 bp, Artificial Sequence
  Detection oligonucleotide for FOS
atagtcggggttacgt

SEQ ID NO: 1652 - DNA, 16 bp, Artificial Sequence
  Detection oligonucleotide for GSTP1
ttgcgatttcggagtt

SEQ ID NO: 1653 - DNA, 16 bp, Artificial Sequence
  Detection oligonucleotide for GSTP1
atatcgcggggggaaa

SEQ ID NO: 1654 - DNA, 16 bp, Artificial Sequence
  Detection oligonucleotide for GSTP1
atattgtggggggaaa

SEQ ID NO: 1655 - DNA, 16 bp, Artificial Sequence
  Detection oligonucleotide for GSTP1
agtgtgcgtagcgaat

SEQ ID NO: 1656 - DNA, 16 bp, Artificial Sequence
  Detection oligonucleotide for GSTP1
agaggatcgtagcgaa

SEQ ID NO: 1657 - DNA, 16 bp, Artificial Sequence
  Detection oligonucleotide for HRAS
ggcgaggcgatagttt

SEQ ID NO: 1658 - DNA, 16 bp, Artificial Sequence
  Detection oligonucleotide for HRAS
ggtgaggtgatagttt

SEQ ID NO: 1659 - DNA, 17 bp, Artificial Sequence
  Detection oligonucleotide for HRAS
tagttttttcgtacgtt

SEQ ID NO: 1660 - DNA, 17 bp, Artificial Sequence
  Detection oligonucleotide for NRG3
ggttttttcgaaggtat

SEQ ID NO: 1661 - DNA, 17 bp, Artificial Sequence
  Detection oligonucleotide for NRG3
ttttgacggagtttatt

SEQ ID NO: 1662 - DNA, 17 bp, Artificial Sequence
  Detection oligonucleotide for NRG3
tttttcgttcgtcggta

SEQ ID NO: 1663 - DNA, 16 bp, Artificial Sequence
  Detection oligonucleotide for NRG3
gtcggtgggtacgtat

SEQ ID NO: 1664 - DNA, 16 bp, Artificial Sequence
  Detection oligonucleotide for MDR1(ABCB1)
gtagcgtttaaatcgt

SEQ ID NO: 1665 - DNA, 17 bp, Artificial Sequence
  Detection oligonucleotide for MDR1(ABCB1)
gtcggtattagacgcgt

SEQ ID NO: 1666 - DNA, 17 bp, Artificial Sequence
  Detection oligonucleotide for MDR1(ABCB1)
gttggtattagatgtgt

SEQ ID NO: 1667 - DNA, 18 bp, Artificial Sequence
  Detection oligonucleotide for MDR1(ABCB1)
ggagattttacgagtaat

SEQ ID NO: 1668 - DNA, 16 bp, Artificial Sequence
  Detection oligonucleotide for MDR1(ABCB1)
gtatagttcgcgcggt

SEQ ID NO: 1669 - DNA, 16 bp, Artificial Sequence
  Detection oligonucleotide for MDR1(ABCB1)
ttcggagcgcgtatag

SEQ ID NO: 1670 - DNA, 16 bp, Artificial Sequence
  Detection oligonucleotide for RARB
atgtcgagaacgcgag

SEQ ID NO: 1671 - DNA, 16 bp, Artificial Sequence
  Detection oligonucleotide for RARB
agcgattcgagtaggg

SEQ ID NO: 1672 - DNA, 16 bp, Artificial Sequence
  Detection oligonucleotide for RARB
agtgatttgagtaggg

SEQ ID NO: 1673 - DNA, 16 bp, Artificial Sequence
  Detection oligonucleotide for RARB
tatcgtcggggtagga

SEQ ID NO: 1674 - DNA, 16 bp, Artificial Sequence
  Detection oligonucleotide for RARB
tattgttggggtagga

SEQ ID NO: 1675 - DNA, 16 bp, Artificial Sequence
  Detection oligonucleotide for RARB
aacgtattcggaaggt

SEQ ID NO: 1676 - DNA, 20 bp, Artificial Sequence
  Detection oligonucleotide for ESR1
ttcgtgttagatttcgatat

SEQ ID NO: 1677 - DNA, 20 bp, Artificial Sequence
  Detection oligonucleotide for ESR1
tttgtgttagattttgatat

SEQ ID NO: 1678 - DNA, 16 bp, Artificial Sequence
  Detection oligonucleotide for ESR1
aacgcgaaagacggat

SEQ ID NO: 1679 - DNA, 16 bp, Artificial Sequence
  Detection oligonucleotide for BCL2L1
gaatgttcgtcggtat

SEQ ID NO: 1680 - DNA, 16 bp, Artificial Sequence
  Detection oligonucleotide for BCL2L1
tatttatcgcggggtt

SEQ ID NO: 1681 - DNA, 17 bp, Artificial Sequence
  Detection oligonucleotide for PIK3CA
ggaaagtatcggtattt

SEQ ID NO: 1682 - DNA, 18 bp, Artificial Sequence
  Detection oligonucleotide for PIK3CA
tgatatttacgttgtaga

SEQ ID NO: 1683 - DNA, 18 bp, Artificial Sequence
  Detection oligonucleotide for MAPK1
atcgagtagggttcgaat

SEQ ID NO: 1684 - DNA, 18 bp, Artificial Sequence
  Detection oligonucleotide for MAPK1
attgagtagggtttgaat

SEQ ID NO: 1685 - DNA, 17 bp, Artificial Sequence
  Detection oligonucleotide for MAPK1
ttagcgagggatttcgg

SEQ ID NO: 1686 - DNA, 17 bp, Artificial Sequence
  Detection oligonucleotide for MAPK1
ttagtgagggattttgg

SEQ ID NO: 1687 - DNA, 16 bp, Artificial Sequence
  Detection oligonucleotide for MAPK1
tagcgtcgtagtttag

SEQ ID NO: 1688 - DNA, 17 bp, Artificial Sequence
  Detection oligonucleotide for EREG
ttttcgggttttaacgg

SEQ ID NO: 1689 - DNA, 16 bp, Artificial Sequence
  Detection oligonucleotide for EREG
ggtgttgcgaatttta

SEQ ID NO: 1690 - DNA, 16 bp, Artificial Sequence
  Detection oligonucleotide for EREG
aggaggatcgttagga

SEQ ID NO: 1691 - DNA, 16 bp, Artificial Sequence
  Detection oligonucleotide for EREG
aggaggattgttagga

SEQ ID NO: 1692 - DNA, 16 bp, Artificial Sequence
  Detection oligonucleotide for EREG
aattggttcgagggag

SEQ ID NO: 1693 - DNA, 16 bp, Artificial Sequence
  Detection oligonucleotide for EREG
aattggtttgagggag

SEQ ID NO: 1694 - DNA, 16 bp, Artificial Sequence
  Detection oligonucleotide for RASSF1
tatttcggacggttat

SEQ ID NO: 1695 - DNA, 16 bp, Artificial Sequence
  Detection oligonucleotide for RASSF1
gacggcgatcgtaaag

SEQ ID NO: 1696 - DNA, 17 bp, Artificial Sequence
  Detection oligonucleotide for RASSF1
tacgcggagatattcgt

SEQ ID NO: 1697 - DNA, 16 bp, Artificial Sequence
  Detection oligonucleotide for RASSF1
ggcgcgttttcgtaga

SEQ ID NO: 1698 - DNA, 16 bp, Artificial Sequence
  Detection oligonucleotide for IGF1R
ttaatattcgacgggg

SEQ ID NO: 1699 - DNA, 17 bp, Artificial Sequence
  Detection oligonucleotide for IGF1R
ttttacgtatgacgttt

SEQ ID NO: 1700 - DNA, 18 bp, Artificial Sequence
  Detection oligonucleotide for IGF1R
tttacgttttcgataatt

SEQ ID NO: 1701 - DNA, 16 bp, Artificial Sequence
  Detection oligonucleotide for EGF
taggatcgatttggag

SEQ ID NO: 1702 - DNA, 16 bp, Artificial Sequence
  Detection oligonucleotide for EGF
atgtagatcgaagggt

SEQ ID NO: 1703 - DNA, 19 bp, Artificial Sequence
  Detection oligonucleotide for IGF1
ttatatacgaattgaagag

SEQ ID NO: 1704 - DNA, 16 bp, Artificial Sequence
  Detection oligonucleotide for IGF1
tttcgtagagcgtttt

SEQ ID NO: 1705 - DNA, 16 bp, Artificial Sequence
  Detection oligonucleotide for IGF1
tagagcgttttcggtt

SEQ ID NO: 1706 - DNA, 18 bp, Artificial Sequence
  Detection oligonucleotide for IGF1
ttcggtttagtcgtggta

SEQ ID NO: 1707 - DNA, 18 bp, Artificial Sequence
  Detection oligonucleotide for IGF1
tttggtttagttgtggta

SEQ ID NO: 1708 - DNA, 17 bp, Artificial Sequence
  Detection oligonucleotide for STAT1
agttacgtatagtacgt

SEQ ID NO: 1709 - DNA, 16 bp, Artificial Sequence
  Detection oligonucleotide for STAT1
agtgcgaacgttaatt

SEQ ID NO: 1710 - DNA, 18 bp, Artificial Sequence
  Detection oligonucleotide for AREG
tattgtcgatgatttagt

SEQ ID NO: 1711 - DNA, 16 bp, Artificial Sequence
  Detection oligonucleotide for AREG
aatcgttttcgggagt

SEQ ID NO: 1712 - DNA, 16 bp, Artificial Sequence
  Detection oligonucleotide for AREG
ttcgggagtcgattat

SEQ ID NO: 1713 - DNA, 20 bp, Artificial Sequence
  Detection oligonucleotide for AREG
agtatgataacgaattataa

SEQ ID NO: 1714 - DNA, 16 bp, Artificial Sequence
  Detection oligonucleotide for GP1BB
taggggacggtatcga

SEQ ID NO: 1715 - DNA, 16 bp, Artificial Sequence
  Detection oligonucleotide for GP1BB
taggggatggtattga

SEQ ID NO: 1716 - DNA, 16 bp, Artificial Sequence
  Detection oligonucleotide for GP1BB
tttcgagcgagggtag

SEQ ID NO: 1717 - DNA, 16 bp, Artificial Sequence
  Detection oligonucleotide for GP1BB
ttttgagtgagggtag

SEQ ID NO: 1718 - DNA, 17 bp, Artificial Sequence
  Detection oligonucleotide for GP1BB
agcggttacgatttcgt

SEQ ID NO: 1719 - DNA, 18 bp, Artificial Sequence
  Detection oligonucleotide for PTPRCAP(RPS6KB2)
ttcgtaggattttcggtt

SEQ ID NO: 1720 - DNA, 18 bp, Artificial Sequence
  Detection oligonucleotide for PTPRCAP(RPS6KB2)
tttgtaggatttttggtt

SEQ ID NO: 1721 - DNA, 16 bp, Artificial Sequence
  Detection oligonucleotide for STK15(STK6)
aacgggggtcgtttta

SEQ ID NO: 1722 - DNA, 16 bp, Artificial Sequence
  Detection oligonucleotide for STK15(STK6)
aatgggggttgtttta

SEQ ID NO: 1723 - DNA, 16 bp, Artificial Sequence
  Detection oligonucleotide for STK15(STK6)
agtgcggtttaacggg

SEQ ID NO: 1724 - DNA, 16 bp, Artificial Sequence
  Detection oligonucleotide for STK15(STK6)
agtgtggtttaatggg

SEQ ID NO: 1725 - DNA, 16 bp, Artificial Sequence
  Detection oligonucleotide for STK15(STK6)
taagcgtacggagaat

SEQ ID NO: 1726 - DNA, 16 bp, Artificial Sequence
  Detection oligonucleotide for BTC
tgatggatcgggtcgt

SEQ ID NO: 1727 - DNA, 16 bp, Artificial Sequence
  Detection oligonucleotide for BTC
tttcgggcgtttgaga

SEQ ID NO: 1728 - DNA, 17 bp, Artificial Sequence
  Detection oligonucleotide for FOXF1
aagtcgtaggtgttcgg

SEQ ID NO: 1729 - DNA, 17 bp, Artificial Sequence
  Detection oligonucleotide for FOXF1
aagttgtaggtgtttgg

SEQ ID NO: 1730 - DNA, 16 bp, Artificial Sequence
  Detection oligonucleotide for FOXF1
gtcgtcggtcgagttt

SEQ ID NO: 1731 - DNA, 17 bp, Artificial Sequence
  Detection oligonucleotide for FOXF1
gtcgttttttagcgtta

SEQ ID NO: 1732 - DNA, 16 bp, Artificial Sequence
  Detection oligonucleotide for FOXF1
tttacgttgttcggta

SEQ ID NO: 1733 - DNA, 16 bp, Artificial Sequence
  Detection oligonucleotide for SHC1
aaagttttcgtggcgg

SEQ ID NO: 1734 - DNA, 16 bp, Artificial Sequence
  Detection oligonucleotide for SHC1
tattcgagttttgcgt

SEQ ID NO: 1735 - DNA, 16 bp, Artificial Sequence
  Detection oligonucleotide for SHC1
ggaaatttcgggtttt

SEQ ID NO: 1736 - DNA, 16 bp, Artificial Sequence
  Detection oligonucleotide for SHC1
taaatcggttcgcggt

SEQ ID NO: 1737 - DNA, 16 bp, Artificial Sequence
  Detection oligonucleotide for SHC1
tggcgtgattcggtat

SEQ ID NO: 1738 - DNA, 16 bp, Artificial Sequence
  Detection oligonucleotide for SHC1
tggtgtgatttggtat

SEQ ID NO: 1739 - DNA, 17 bp, Artificial Sequence
  Detection oligonucleotide for SHC1
agtttcgcgtgggttta

SEQ ID NO: 1740 - DNA, 17 bp, Artificial Sequence
  Detection oligonucleotide for SHC1
agttttgtgtgggttta

SEQ ID NO: 1741 - DNA, 16 bp, Artificial Sequence
  Detection oligonucleotide for SHC1
ttggagcggtaattta

SEQ ID NO: 1742 - DNA, 16 bp, Artificial Sequence
  Detection oligonucleotide for STK12(AURKB)
tttcggtcgttcgtaa

SEQ ID NO: 1743 - DNA, 16 bp, Artificial Sequence
  Detection oligonucleotide for STK12(AURKB)
atttgttacgtcgcgt

SEQ ID NO: 1744 - DNA, 16 bp, Artificial Sequence
  Detection oligonucleotide for STK12(AURKB)
agttcgtcgtttatgt

SEQ ID NO: 1745 - DNA, 16 bp, Artificial Sequence
  Detection oligonucleotide for RASGRP2
gtagtcgtaggcggtt

SEQ ID NO: 1746 - DNA, 16 bp, Artificial Sequence
  Detection oligonucleotide for RASGRP2
agcgggtaacggtttt

SEQ ID NO: 1747 - DNA, 16 bp, Artificial Sequence
  Detection oligonucleotide for RASGRP2
agtgggtaatggtttt

SEQ ID NO: 1748 - DNA, 16 bp, Artificial Sequence
  Detection oligonucleotide for RASGRP2
aggatcgttttcgtat

SEQ ID NO: 1749 - DNA, 16 bp, Artificial Sequence
  Detection oligonucleotide for ABCC4
aggtataacgggacgt

SEQ ID NO: 1750 - DNA, 17 bp, Artificial Sequence
  Detection oligonucleotide for ABCC4
atcgagttgtttcgtaa

SEQ ID NO: 1751 - DNA, 20 bp, Artificial Sequence
  Detection oligonucleotide for ABCC4
tttcgtaaggaatatcggaa

SEQ ID NO: 1752 - DNA, 20 bp, Artificial Sequence
  Detection oligonucleotide for ABCC4
ttttgtaaggaatattggaa

SEQ ID NO: 1753 - DNA, 16 bp, Artificial Sequence
  Detection oligonucleotide for RASGRP1
gatttcgcgttttgat

SEQ ID NO: 1754 - DNA, 16 bp, Artificial Sequence
  Detection oligonucleotide for RASGRP1
ttagacgcggtcgttt

SEQ ID NO: 1755 - DNA, 16 bp, Artificial Sequence
  Detection oligonucleotide for RASGRP1
ataacgttagtgcgta
